United States Patent Application Publication US 2026/0041763 A1 - sequence listing, part 4

SEQ ID NO: 92016 - protein, 22 aa, Severe acute respiratory syndrome coronavirus 2
TCGTTTLNGLWLDDVVYCPRHV

SEQ ID NO: 92017 - protein, 22 aa, Severe acute respiratory syndrome coronavirus 2
CGTTTLNGLWLDDVVYCPRHVI

SEQ ID NO: 92018 - protein, 22 aa, Severe acute respiratory syndrome coronavirus 2
GTTTLNGLWLDDVVYCPRHVIC

SEQ ID NO: 92019 - protein, 22 aa, Severe acute respiratory syndrome coronavirus 2
SFCYMHHMELPTGVHAGTDLEG

SEQ ID NO: 92020 - protein, 22 aa, Severe acute respiratory syndrome coronavirus 2
FCYMHHMELPTGVHAGTDLEGN

SEQ ID NO: 92021 - protein, 22 aa, Severe acute respiratory syndrome coronavirus 2
TILGSALLEDEFTPFDVVRQCS

SEQ ID NO: 92022 - protein, 22 aa, Severe acute respiratory syndrome coronavirus 2
ILGSALLEDEFTPFDVVRQCSG

SEQ ID NO: 92023 - protein, 22 aa, Severe acute respiratory syndrome coronavirus 2
LGSALLEDEFTPFDVVRQCSGV

SEQ ID NO: 92024 - protein, 22 aa, Severe acute respiratory syndrome coronavirus 2
SAVKRTIKGTHHWLLLTILTSL

SEQ ID NO: 92025 - protein, 22 aa, Severe acute respiratory syndrome coronavirus 2
AVKRTIKGTHHWLLLTILTSLL

SEQ ID NO: 92026 - protein, 22 aa, Severe acute respiratory syndrome coronavirus 2
VKRTIKGTHHWLLLTILTSLLV

SEQ ID NO: 92027 - protein, 22 aa, Severe acute respiratory syndrome coronavirus 2
KRTIKGTHHWLLLTILTSLLVL

SEQ ID NO: 92028 - protein, 22 aa, Severe acute respiratory syndrome coronavirus 2
RTIKGTHHWLLLTILTSLLVLV

SEQ ID NO: 92029 - protein, 22 aa, Severe acute respiratory syndrome coronavirus 2
TIKGTHHWLLLTILTSLLVLVQ

SEQ ID NO: 92030 - protein, 22 aa, Severe acute respiratory syndrome coronavirus 2
IKGTHHWLLLTILTSLLVLVQS

SEQ ID NO: 92031 - protein, 22 aa, Severe acute respiratory syndrome coronavirus 2
KGTHHWLLLTILTSLLVLVQST

SEQ ID NO: 92032 - protein, 22 aa, Severe acute respiratory syndrome coronavirus 2
GTHHWLLLTILTSLLVLVQSTQ

SEQ ID NO: 92033 - protein, 22 aa, Severe acute respiratory syndrome coronavirus 2
THHWLLLTILTSLLVLVQSTQW

SEQ ID NO: 92034 - protein, 22 aa, Severe acute respiratory syndrome coronavirus 2
HHWLLLTILTSLLVLVQSTQWS

SEQ ID NO: 92035 - protein, 22 aa, Severe acute respiratory syndrome coronavirus 2
HWLLLTILTSLLVLVQSTQWSL

SEQ ID NO: 92036 - protein, 22 aa, Severe acute respiratory syndrome coronavirus 2
WLLLTILTSLLVLVQSTQWSLF

SEQ ID NO: 92037 - protein, 22 aa, Severe acute respiratory syndrome coronavirus 2
MGIIAMSAFAMMFVKHKHAFLC

SEQ ID NO: 92038 - protein, 22 aa, Severe acute respiratory syndrome coronavirus 2
GIIAMSAFAMMFVKHKHAFLCL

SEQ ID NO: 92039 - protein, 22 aa, Severe acute respiratory syndrome coronavirus 2
IIAMSAFAMMFVKHKHAFLCLF

SEQ ID NO: 92040 - protein, 22 aa, Severe acute respiratory syndrome coronavirus 2
IAMSAFAMMFVKHKHAFLCLFL

SEQ ID NO: 92041 - protein, 22 aa, Severe acute respiratory syndrome coronavirus 2
AMSAFAMMFVKHKHAFLCLFLL

SEQ ID NO: 92042 - protein, 22 aa, Severe acute respiratory syndrome coronavirus 2
MSAFAMMFVKHKHAFLCLFLLP

SEQ ID NO: 92043 - protein, 22 aa, Severe acute respiratory syndrome coronavirus 2
SAFAMMFVKHKHAFLCLFLLPS

SEQ ID NO: 92044 - protein, 22 aa, Severe acute respiratory syndrome coronavirus 2
TVAYFNMVYMPASWVMRIMTWL

SEQ ID NO: 92045 - protein, 22 aa, Severe acute respiratory syndrome coronavirus 2
MVDTSLSGFKLKDCVMYASAVV

SEQ ID NO: 92046 - protein, 22 aa, Severe acute respiratory syndrome coronavirus 2
VDTSLSGFKLKDCVMYASAVVL

SEQ ID NO: 92047 - protein, 22 aa, Severe acute respiratory syndrome coronavirus 2
DTSLSGFKLKDCVMYASAVVLL

SEQ ID NO: 92048 - protein, 22 aa, Severe acute respiratory syndrome coronavirus 2
TSLSGFKLKDCVMYASAVVLLI

SEQ ID NO: 92049 - protein, 22 aa, Severe acute respiratory syndrome coronavirus 2
SLSGFKLKDCVMYASAVVLLIL

SEQ ID NO: 92050 - protein, 22 aa, Severe acute respiratory syndrome coronavirus 2
LSGFKLKDCVMYASAVVLLILM

SEQ ID NO: 92051 - protein, 22 aa, Severe acute respiratory syndrome coronavirus 2
SGFKLKDCVMYASAVVLLILMT

SEQ ID NO: 92052 - protein, 22 aa, Severe acute respiratory syndrome coronavirus 2
CIMLVYCFLGYFCTCYFGLFCL

SEQ ID NO: 92053 - protein, 22 aa, Severe acute respiratory syndrome coronavirus 2
CYFGLFCLLNRYFRLTLGVYDY

SEQ ID NO: 92054 - protein, 22 aa, Severe acute respiratory syndrome coronavirus 2
YFGLFCLLNRYFRLTLGVYDYL

SEQ ID NO: 92055 - protein, 22 aa, Severe acute respiratory syndrome coronavirus 2
NRYFRLTLGVYDYLVSTQEFRY

SEQ ID NO: 92056 - protein, 22 aa, Severe acute respiratory syndrome coronavirus 2
RYFRLTLGVYDYLVSTQEFRYM

SEQ ID NO: 92057 - protein, 22 aa, Severe acute respiratory syndrome coronavirus 2
YFRLTLGVYDYLVSTQEFRYMN

SEQ ID NO: 92058 - protein, 22 aa, Severe acute respiratory syndrome coronavirus 2
FRLTLGVYDYLVSTQEFRYMNS

SEQ ID NO: 92059 - protein, 22 aa, Severe acute respiratory syndrome coronavirus 2
RLTLGVYDYLVSTQEFRYMNSQ

SEQ ID NO: 92060 - protein, 22 aa, Severe acute respiratory syndrome coronavirus 2
LTLGVYDYLVSTQEFRYMNSQG

SEQ ID NO: 92061 - protein, 22 aa, Severe acute respiratory syndrome coronavirus 2
TLGVYDYLVSTQEFRYMNSQGL

SEQ ID NO: 92062 - protein, 22 aa, Severe acute respiratory syndrome coronavirus 2
SKMSDVKCTSVVLLSVLQQLRV

SEQ ID NO: 92063 - protein, 22 aa, Severe acute respiratory syndrome coronavirus 2
KMSDVKCTSVVLLSVLQQLRVE

SEQ ID NO: 92064 - protein, 22 aa, Severe acute respiratory syndrome coronavirus 2
MSDVKCTSVVLLSVLQQLRVES

SEQ ID NO: 92065 - protein, 22 aa, Severe acute respiratory syndrome coronavirus 2
VQLHNDILLAKDTTEAFEKMVS

SEQ ID NO: 92066 - protein, 22 aa, Severe acute respiratory syndrome coronavirus 2
QLHNDILLAKDTTEAFEKMVSL

SEQ ID NO: 92067 - protein, 22 aa, Severe acute respiratory syndrome coronavirus 2
LHNDILLAKDTTEAFEKMVSLL

SEQ ID NO: 92068 - protein, 22 aa, Severe acute respiratory syndrome coronavirus 2
HNDILLAKDTTEAFEKMVSLLS

SEQ ID NO: 92069 - protein, 22 aa, Severe acute respiratory syndrome coronavirus 2
LLSMQGAVDINKLCEEMLDNRA

SEQ ID NO: 92070 - protein, 22 aa, Severe acute respiratory syndrome coronavirus 2
LSMQGAVDINKLCEEMLDNRAT

SEQ ID NO: 92071 - protein, 22 aa, Severe acute respiratory syndrome coronavirus 2
SMQGAVDINKLCEEMLDNRATL

SEQ ID NO: 92072 - protein, 22 aa, Severe acute respiratory syndrome coronavirus 2
MQGAVDINKLCEEMLDNRATLQ

SEQ ID NO: 92073 - protein, 22 aa, Severe acute respiratory syndrome coronavirus 2
AMQRKLEKMADQAMTQMYKQAR

SEQ ID NO: 92074 - protein, 22 aa, Severe acute respiratory syndrome coronavirus 2
MQRKLEKMADQAMTQMYKQARS

SEQ ID NO: 92075 - protein, 22 aa, Severe acute respiratory syndrome coronavirus 2
QRKLEKMADQAMTQMYKQARSE

SEQ ID NO: 92076 - protein, 22 aa, Severe acute respiratory syndrome coronavirus 2
RKLEKMADQAMTQMYKQARSED

SEQ ID NO: 92077 - protein, 22 aa, Severe acute respiratory syndrome coronavirus 2
KLEKMADQAMTQMYKQARSEDK

SEQ ID NO: 92078 - protein, 22 aa, Severe acute respiratory syndrome coronavirus 2
LEKMADQAMTQMYKQARSEDKR

SEQ ID NO: 92079 - protein, 22 aa, Severe acute respiratory syndrome coronavirus 2
EKMADQAMTQMYKQARSEDKRA

SEQ ID NO: 92080 - protein, 22 aa, Severe acute respiratory syndrome coronavirus 2
KMADQAMTQMYKQARSEDKRAK

SEQ ID NO: 92081 - protein, 22 aa, Severe acute respiratory syndrome coronavirus 2
MADQAMTQMYKQARSEDKRAKV

SEQ ID NO: 92082 - protein, 22 aa, Severe acute respiratory syndrome coronavirus 2
ADQAMTQMYKQARSEDKRAKVT

SEQ ID NO: 92083 - protein, 22 aa, Severe acute respiratory syndrome coronavirus 2
DQAMTQMYKQARSEDKRAKVTS

SEQ ID NO: 92084 - protein, 22 aa, Severe acute respiratory syndrome coronavirus 2
QAMTQMYKQARSEDKRAKVTSA

SEQ ID NO: 92085 - protein, 22 aa, Severe acute respiratory syndrome coronavirus 2
AMTQMYKQARSEDKRAKVTSAM

SEQ ID NO: 92086 - protein, 22 aa, Severe acute respiratory syndrome coronavirus 2
QMYKQARSEDKRAKVTSAMQTM

SEQ ID NO: 92087 - protein, 22 aa, Severe acute respiratory syndrome coronavirus 2
MYKQARSEDKRAKVTSAMQTML

SEQ ID NO: 92088 - protein, 22 aa, Severe acute respiratory syndrome coronavirus 2
YKQARSEDKRAKVTSAMQTMLF

SEQ ID NO: 92089 - protein, 22 aa, Severe acute respiratory syndrome coronavirus 2
KQARSEDKRAKVTSAMQTMLFT

SEQ ID NO: 92090 - protein, 22 aa, Severe acute respiratory syndrome coronavirus 2
QARSEDKRAKVTSAMQTMLFTM

SEQ ID NO: 92091 - protein, 22 aa, Severe acute respiratory syndrome coronavirus 2
ARSEDKRAKVTSAMQTMLFTML

SEQ ID NO: 92092 - protein, 22 aa, Severe acute respiratory syndrome coronavirus 2
RSEDKRAKVTSAMQTMLFTMLR

SEQ ID NO: 92093 - protein, 22 aa, Severe acute respiratory syndrome coronavirus 2
SEDKRAKVTSAMQTMLFTMLRK

SEQ ID NO: 92094 - protein, 22 aa, Severe acute respiratory syndrome coronavirus 2
EDKRAKVTSAMQTMLFTMLRKL

SEQ ID NO: 92095 - protein, 22 aa, Severe acute respiratory syndrome coronavirus 2
DKRAKVTSAMQTMLFTMLRKLD

SEQ ID NO: 92096 - protein, 22 aa, Severe acute respiratory syndrome coronavirus 2
KRAKVTSAMQTMLFTMLRKLDN

SEQ ID NO: 92097 - protein, 22 aa, Severe acute respiratory syndrome coronavirus 2
RKLDNDALNNIINNARDGCVPL

SEQ ID NO: 92098 - protein, 22 aa, Severe acute respiratory syndrome coronavirus 2
KLDNDALNNIINNARDGCVPLN

SEQ ID NO: 92099 - protein, 22 aa, Severe acute respiratory syndrome coronavirus 2
LDNDALNNIINNARDGCVPLNI

SEQ ID NO: 92100 - protein, 22 aa, Severe acute respiratory syndrome coronavirus 2
DNDALNNIINNARDGCVPLNII

SEQ ID NO: 92101 - protein, 22 aa, Severe acute respiratory syndrome coronavirus 2
NDALNNIINNARDGCVPLNIIP

SEQ ID NO: 92102 - protein, 22 aa, Severe acute respiratory syndrome coronavirus 2
DALNNIINNARDGCVPLNIIPL

SEQ ID NO: 92103 - protein, 22 aa, Severe acute respiratory syndrome coronavirus 2
ALNNIINNARDGCVPLNIIPLT

SEQ ID NO: 92104 - protein, 22 aa, Severe acute respiratory syndrome coronavirus 2
VDADSKIVQLSEISMDNSPNLA

SEQ ID NO: 92105 - protein, 22 aa, Severe acute respiratory syndrome coronavirus 2
DADSKIVQLSEISMDNSPNLAW

SEQ ID NO: 92106 - protein, 22 aa, Severe acute respiratory syndrome coronavirus 2
ADSKIVQLSEISMDNSPNLAWP

SEQ ID NO: 92107 - protein, 22 aa, Severe acute respiratory syndrome coronavirus 2
DSKIVQLSEISMDNSPNLAWPL

SEQ ID NO: 92108 - protein, 22 aa, Severe acute respiratory syndrome coronavirus 2
SKIVQLSEISMDNSPNLAWPLI

SEQ ID NO: 92109 - protein, 22 aa, Severe acute respiratory syndrome coronavirus 2
KIVQLSEISMDNSPNLAWPLIV

SEQ ID NO: 92110 - protein, 22 aa, Severe acute respiratory syndrome coronavirus 2
PCRFVTDTPKGPKVKYLYFIKG

SEQ ID NO: 92111 - protein, 22 aa, Severe acute respiratory syndrome coronavirus 2
CRFVTDTPKGPKVKYLYFIKGL

SEQ ID NO: 92112 - protein, 22 aa, Severe acute respiratory syndrome coronavirus 2
RFVTDTPKGPKVKYLYFIKGLN

SEQ ID NO: 92113 - protein, 22 aa, Severe acute respiratory syndrome coronavirus 2
FVTDTPKGPKVKYLYFIKGLNN

SEQ ID NO: 92114 - protein, 22 aa, Severe acute respiratory syndrome coronavirus 2
VTDTPKGPKVKYLYFIKGLNNL

SEQ ID NO: 92115 - protein, 22 aa, Severe acute respiratory syndrome coronavirus 2
TDTPKGPKVKYLYFIKGLNNLN

SEQ ID NO: 92116 - protein, 22 aa, Severe acute respiratory syndrome coronavirus 2
DTPKGPKVKYLYFIKGLNNLNR

SEQ ID NO: 92117 - protein, 22 aa, Severe acute respiratory syndrome coronavirus 2
TPKGPKVKYLYFIKGLNNLNRG

SEQ ID NO: 92118 - protein, 22 aa, Severe acute respiratory syndrome coronavirus 2
PKGPKVKYLYFIKGLNNLNRGM

SEQ ID NO: 92119 - protein, 22 aa, Severe acute respiratory syndrome coronavirus 2
KGPKVKYLYFIKGLNNLNRGMV

SEQ ID NO: 92120 - protein, 22 aa, Severe acute respiratory syndrome coronavirus 2
GPKVKYLYFIKGLNNLNRGMVL

SEQ ID NO: 92121 - protein, 22 aa, Severe acute respiratory syndrome coronavirus 2
VLSFCAFAVDAAKAYKDYLASG

SEQ ID NO: 92122 - protein, 22 aa, Severe acute respiratory syndrome coronavirus 2
LSFCAFAVDAAKAYKDYLASGG

SEQ ID NO: 92123 - protein, 22 aa, Severe acute respiratory syndrome coronavirus 2
SFCAFAVDAAKAYKDYLASGGQ

SEQ ID NO: 92124 - protein, 22 aa, Severe acute respiratory syndrome coronavirus 2
VDAAKAYKDYLASGGQPITNCV

SEQ ID NO: 92125 - protein, 22 aa, Severe acute respiratory syndrome coronavirus 2
DAAKAYKDYLASGGQPITNCVK

SEQ ID NO: 92126 - protein, 22 aa, Severe acute respiratory syndrome coronavirus 2
AAKAYKDYLASGGQPITNCVKM

SEQ ID NO: 92127 - protein, 22 aa, Severe acute respiratory syndrome coronavirus 2
AKAYKDYLASGGQPITNCVKML

SEQ ID NO: 92128 - protein, 22 aa, Severe acute respiratory syndrome coronavirus 2
KAYKDYLASGGQPITNCVKMLC

SEQ ID NO: 92129 - protein, 22 aa, Severe acute respiratory syndrome coronavirus 2
AYKDYLASGGQPITNCVKMLCT

SEQ ID NO: 92130 - protein, 22 aa, Severe acute respiratory syndrome coronavirus 2
YKDYLASGGQPITNCVKMLCTH

SEQ ID NO: 92131 - protein, 23 aa, Severe acute respiratory syndrome coronavirus 2
TCGLVEVEKGVLPQLEQPYVFIK

SEQ ID NO: 92132 - protein, 23 aa, Severe acute respiratory syndrome coronavirus 2
CGLVEVEKGVLPQLEQPYVFIKR

SEQ ID NO: 92133 - protein, 23 aa, Severe acute respiratory syndrome coronavirus 2
VYCCREHEHEIAWYTERSEKSYE

SEQ ID NO: 92134 - protein, 23 aa, Severe acute respiratory syndrome coronavirus 2
YCCREHEHEIAWYTERSEKSYEL

SEQ ID NO: 92135 - protein, 23 aa, Severe acute respiratory syndrome coronavirus 2
CCREHEHEIAWYTERSEKSYELQ

SEQ ID NO: 92136 - protein, 23 aa, Severe acute respiratory syndrome coronavirus 2
CREHEHEIAWYTERSEKSYELQT

SEQ ID NO: 92137 - protein, 23 aa, Severe acute respiratory syndrome coronavirus 2
REHEHEIAWYTERSEKSYELQTP

SEQ ID NO: 92138 - protein, 23 aa, Severe acute respiratory syndrome coronavirus 2
EHEHEIAWYTERSEKSYELQTPF

SEQ ID NO: 92139 - protein, 23 aa, Severe acute respiratory syndrome coronavirus 2
HEHEIAWYTERSEKSYELQTPFE

SEQ ID NO: 92140 - protein, 23 aa, Severe acute respiratory syndrome coronavirus 2
EHEIAWYTERSEKSYELQTPFEI

SEQ ID NO: 92141 - protein, 23 aa, Severe acute respiratory syndrome coronavirus 2
HEIAWYTERSEKSYELQTPFEIK

SEQ ID NO: 92142 - protein, 23 aa, Severe acute respiratory syndrome coronavirus 2
EIAWYTERSEKSYELQTPFEIKL

SEQ ID NO: 92143 - protein, 23 aa, Severe acute respiratory syndrome coronavirus 2
IAWYTERSEKSYELQTPFEIKLA

SEQ ID NO: 92144 - protein, 23 aa, Severe acute respiratory syndrome coronavirus 2
AWYTERSEKSYELQTPFEIKLAK

SEQ ID NO: 92145 - protein, 23 aa, Severe acute respiratory syndrome coronavirus 2
WYTERSEKSYELQTPFEIKLAKK

SEQ ID NO: 92146 - protein, 23 aa, Severe acute respiratory syndrome coronavirus 2
YTERSEKSYELQTPFEIKLAKKF

SEQ ID NO: 92147 - protein, 23 aa, Severe acute respiratory syndrome coronavirus 2
TERSEKSYELQTPFEIKLAKKFD

SEQ ID NO: 92148 - protein, 23 aa, Severe acute respiratory syndrome coronavirus 2
NKFLALCADSIIIGGAKLKALNL

SEQ ID NO: 92149 - protein, 23 aa, Severe acute respiratory syndrome coronavirus 2
KFLALCADSIIIGGAKLKALNLG

SEQ ID NO: 92150 - protein, 23 aa, Severe acute respiratory syndrome coronavirus 2
FLALCADSIIIGGAKLKALNLGE

SEQ ID NO: 92151 - protein, 23 aa, Severe acute respiratory syndrome coronavirus 2
GSCVLSGHNLAKHCLHVVGPNVN

SEQ ID NO: 92152 - protein, 23 aa, Severe acute respiratory syndrome coronavirus 2
YITTYPGQGLNGYTVEEAKTVLK

SEQ ID NO: 92153 - protein, 23 aa, Severe acute respiratory syndrome coronavirus 2
ITTYPGQGLNGYTVEEAKTVLKK

SEQ ID NO: 92154 - protein, 23 aa, Severe acute respiratory syndrome coronavirus 2
TTYPGQGLNGYTVEEAKTVLKKC

SEQ ID NO: 92155 - protein, 23 aa, Severe acute respiratory syndrome coronavirus 2
TYPGQGLNGYTVEEAKTVLKKCK

SEQ ID NO: 92156 - protein, 23 aa, Severe acute respiratory syndrome coronavirus 2
YPGQGLNGYTVEEAKTVLKKCKS

SEQ ID NO: 92157 - protein, 23 aa, Severe acute respiratory syndrome coronavirus 2
TAYNGYLTSSSKTPEEHFIETIS

SEQ ID NO: 92158 - protein, 23 aa, Severe acute respiratory syndrome coronavirus 2
YNGYLTSSSKTPEEHFIETISLA

SEQ ID NO: 92159 - protein, 23 aa, Severe acute respiratory syndrome coronavirus 2
NGYLTSSSKTPEEHFIETISLAG

SEQ ID NO: 92160 - protein, 23 aa, Severe acute respiratory syndrome coronavirus 2
GYLTSSSKTPEEHFIETISLAGS

SEQ ID NO: 92161 - protein, 23 aa, Severe acute respiratory syndrome coronavirus 2
YLTSSSKTPEEHFIETISLAGSY

SEQ ID NO: 92162 - protein, 23 aa, Severe acute respiratory syndrome coronavirus 2
LTSSSKTPEEHFIETISLAGSYK

SEQ ID NO: 92163 - protein, 23 aa, Severe acute respiratory syndrome coronavirus 2
TSSSKTPEEHFIETISLAGSYKD

SEQ ID NO: 92164 - protein, 23 aa, Severe acute respiratory syndrome coronavirus 2
SSSKTPEEHFIETISLAGSYKDW

SEQ ID NO: 92165 - protein, 23 aa, Severe acute respiratory syndrome coronavirus 2
KKWKYPQVNGLTSIKWADNNCYL

SEQ ID NO: 92166 - protein, 23 aa, Severe acute respiratory syndrome coronavirus 2
KWKYPQVNGLTSIKWADNNCYLA

SEQ ID NO: 92167 - protein, 23 aa, Severe acute respiratory syndrome coronavirus 2
WKYPQVNGLTSIKWADNNCYLAT

SEQ ID NO: 92168 - protein, 23 aa, Severe acute respiratory syndrome coronavirus 2
ELKFNPPALQDAYYRARAGEAAN

SEQ ID NO: 92169 - protein, 23 aa, Severe acute respiratory syndrome coronavirus 2
LKFNPPALQDAYYRARAGEAANF

SEQ ID NO: 92170 - protein, 23 aa, Severe acute respiratory syndrome coronavirus 2
KFNPPALQDAYYRARAGEAANFC

SEQ ID NO: 92171 - protein, 23 aa, Severe acute respiratory syndrome coronavirus 2
FNPPALQDAYYRARAGEAANFCA

SEQ ID NO: 92172 - protein, 23 aa, Severe acute respiratory syndrome coronavirus 2
NPPALQDAYYRARAGEAANFCAL

SEQ ID NO: 92173 - protein, 23 aa, Severe acute respiratory syndrome coronavirus 2
LFQHANLDSCKRVLNVVCKTCGQ

SEQ ID NO: 92174 - protein, 23 aa, Severe acute respiratory syndrome coronavirus 2
FQHANLDSCKRVLNVVCKTCGQQ

SEQ ID NO: 92175 - protein, 23 aa, Severe acute respiratory syndrome coronavirus 2
QHANLDSCKRVLNVVCKTCGQQQ

SEQ ID NO: 92176 - protein, 23 aa, Severe acute respiratory syndrome coronavirus 2
HANLDSCKRVLNVVCKTCGQQQT

SEQ ID NO: 92177 - protein, 23 aa, Severe acute respiratory syndrome coronavirus 2
DVFYKENSYTTTIKPVTYKLDGV

SEQ ID NO: 92178 - protein, 23 aa, Severe acute respiratory syndrome coronavirus 2
VFYKENSYTTTIKPVTYKLDGVV

SEQ ID NO: 92179 - protein, 23 aa, Severe acute respiratory syndrome coronavirus 2
FYKENSYTTTIKPVTYKLDGVVC

SEQ ID NO: 92180 - protein, 23 aa, Severe acute respiratory syndrome coronavirus 2
KENSYTTTIKPVTYKLDGVVCTE

SEQ ID NO: 92181 - protein, 23 aa, Severe acute respiratory syndrome coronavirus 2
ENSYTTTIKPVTYKLDGVVCTEI

SEQ ID NO: 92182 - protein, 23 aa, Severe acute respiratory syndrome coronavirus 2
NSYTTTIKPVTYKLDGVVCTEID

SEQ ID NO: 92183 - protein, 23 aa, Severe acute respiratory syndrome coronavirus 2
SYTTTIKPVTYKLDGVVCTEIDP

SEQ ID NO: 92184 - protein, 23 aa, Severe acute respiratory syndrome coronavirus 2
YTTTIKPVTYKLDGVVCTEIDPK

SEQ ID NO: 92185 - protein, 23 aa, Severe acute respiratory syndrome coronavirus 2
TTTIKPVTYKLDGVVCTEIDPKL

SEQ ID NO: 92186 - protein, 23 aa, Severe acute respiratory syndrome coronavirus 2
TTIKPVTYKLDGVVCTEIDPKLD

SEQ ID NO: 92187 - protein, 23 aa, Severe acute respiratory syndrome coronavirus 2
TIKPVTYKLDGVVCTEIDPKLDN

SEQ ID NO: 92188 - protein, 23 aa, Severe acute respiratory syndrome coronavirus 2
IKPVTYKLDGVVCTEIDPKLDNY

SEQ ID NO: 92189 - protein, 23 aa, Severe acute respiratory syndrome coronavirus 2
KPVTYKLDGVVCTEIDPKLDNYY

SEQ ID NO: 92190 - protein, 23 aa, Severe acute respiratory syndrome coronavirus 2
PVTYKLDGVVCTEIDPKLDNYYK

SEQ ID NO: 92191 - protein, 23 aa, Severe acute respiratory syndrome coronavirus 2
VTYKLDGVVCTEIDPKLDNYYKK

SEQ ID NO: 92192 - protein, 23 aa, Severe acute respiratory syndrome coronavirus 2
CTEIDPKLDNYYKKDNSYFTEQP

SEQ ID NO: 92193 - protein, 23 aa, Severe acute respiratory syndrome coronavirus 2
TEIDPKLDNYYKKDNSYFTEQPI

SEQ ID NO: 92194 - protein, 23 aa, Severe acute respiratory syndrome coronavirus 2
EIDPKLDNYYKKDNSYFTEQPID

SEQ ID NO: 92195 - protein, 23 aa, Severe acute respiratory syndrome coronavirus 2
IDPKLDNYYKKDNSYFTEQPIDL

SEQ ID NO: 92196 - protein, 23 aa, Severe acute respiratory syndrome coronavirus 2
DPKLDNYYKKDNSYFTEQPIDLV

SEQ ID NO: 92197 - protein, 23 aa, Severe acute respiratory syndrome coronavirus 2
PKLDNYYKKDNSYFTEQPIDLVP

SEQ ID NO: 92198 - protein, 23 aa, Severe acute respiratory syndrome coronavirus 2
KLDNYYKKDNSYFTEQPIDLVPN

SEQ ID NO: 92199 - protein, 23 aa, Severe acute respiratory syndrome coronavirus 2
LDNYYKKDNSYFTEQPIDLVPNQ

SEQ ID NO: 92200 - protein, 23 aa, Severe acute respiratory syndrome coronavirus 2
DNYYKKDNSYFTEQPIDLVPNQP

SEQ ID NO: 92201 - protein, 23 aa, Severe acute respiratory syndrome coronavirus 2
NYYKKDNSYFTEQPIDLVPNQPY

SEQ ID NO: 92202 - protein, 23 aa, Severe acute respiratory syndrome coronavirus 2
ASFDNFKFVCDNIKFADDLNQLT

SEQ ID NO: 92203 - protein, 23 aa, Severe acute respiratory syndrome coronavirus 2
SFDNFKFVCDNIKFADDLNQLTG

SEQ ID NO: 92204 - protein, 23 aa, Severe acute respiratory syndrome coronavirus 2
FDNFKFVCDNIKFADDLNQLTGY

SEQ ID NO: 92205 - protein, 23 aa, Severe acute respiratory syndrome coronavirus 2
DNFKFVCDNIKFADDLNQLTGYK

SEQ ID NO: 92206 - protein, 23 aa, Severe acute respiratory syndrome coronavirus 2
NFKFVCDNIKFADDLNQLTGYKK

SEQ ID NO: 92207 - protein, 23 aa, Severe acute respiratory syndrome coronavirus 2
FKFVCDNIKFADDLNQLTGYKKP

SEQ ID NO: 92208 - protein, 23 aa, Severe acute respiratory syndrome coronavirus 2
KFVCDNIKFADDLNQLTGYKKPA

SEQ ID NO: 92209 - protein, 23 aa, Severe acute respiratory syndrome coronavirus 2
DLNQLTGYKKPASRELKVTFFPD

SEQ ID NO: 92210 - protein, 23 aa, Severe acute respiratory syndrome coronavirus 2
LNQLTGYKKPASRELKVTFFPDL

SEQ ID NO: 92211 - protein, 23 aa, Severe acute respiratory syndrome coronavirus 2
NQLTGYKKPASRELKVTFFPDLN

SEQ ID NO: 92212 - protein, 23 aa, Severe acute respiratory syndrome coronavirus 2
QLTGYKKPASRELKVTFFPDLNG

SEQ ID NO: 92213 - protein, 23 aa, Severe acute respiratory syndrome coronavirus 2
LTGYKKPASRELKVTFFPDLNGD

SEQ ID NO: 92214 - protein, 23 aa, Severe acute respiratory syndrome coronavirus 2
TGYKKPASRELKVTFFPDLNGDV

SEQ ID NO: 92215 - protein, 23 aa, Severe acute respiratory syndrome coronavirus 2
GYKKPASRELKVTFFPDLNGDVV

SEQ ID NO: 92216 - protein, 23 aa, Severe acute respiratory syndrome coronavirus 2
YKKPASRELKVTFFPDLNGDVVA

SEQ ID NO: 92217 - protein, 23 aa, Severe acute respiratory syndrome coronavirus 2
KKPASRELKVTFFPDLNGDVVAI

SEQ ID NO: 92218 - protein, 23 aa, Severe acute respiratory syndrome coronavirus 2
KPASRELKVTFFPDLNGDVVAID

SEQ ID NO: 92219 - protein, 23 aa, Severe acute respiratory syndrome coronavirus 2
PASRELKVTFFPDLNGDVVAIDY

SEQ ID NO: 92220 - protein, 23 aa, Severe acute respiratory syndrome coronavirus 2
ASRELKVTFFPDLNGDVVAIDYK

SEQ ID NO: 92221 - protein, 23 aa, Severe acute respiratory syndrome coronavirus 2
SRELKVTFFPDLNGDVVAIDYKH

SEQ ID NO: 92222 - protein, 23 aa, Severe acute respiratory syndrome coronavirus 2
RELKVTFFPDLNGDVVAIDYKHY

SEQ ID NO: 92223 - protein, 23 aa, Severe acute respiratory syndrome coronavirus 2
ELKVTFFPDLNGDVVAIDYKHYT

SEQ ID NO: 92224 - protein, 23 aa, Severe acute respiratory syndrome coronavirus 2
LKVTFFPDLNGDVVAIDYKHYTP

SEQ ID NO: 92225 - protein, 23 aa, Severe acute respiratory syndrome coronavirus 2
KVTFFPDLNGDVVAIDYKHYTPS

SEQ ID NO: 92226 - protein, 23 aa, Severe acute respiratory syndrome coronavirus 2
QITISSFKWDLTAFGLVAEWFLA

SEQ ID NO: 92227 - protein, 23 aa, Severe acute respiratory syndrome coronavirus 2
ITISSFKWDLTAFGLVAEWFLAY

SEQ ID NO: 92228 - protein, 23 aa, Severe acute respiratory syndrome coronavirus 2
TISSFKWDLTAFGLVAEWFLAYI

SEQ ID NO: 92229 - protein, 23 aa, Severe acute respiratory syndrome coronavirus 2
ISSFKWDLTAFGLVAEWFLAYIL

SEQ ID NO: 92230 - protein, 23 aa, Severe acute respiratory syndrome coronavirus 2
SSFKWDLTAFGLVAEWFLAYILF

SEQ ID NO: 92231 - protein, 23 aa, Severe acute respiratory syndrome coronavirus 2
SFKWDLTAFGLVAEWFLAYILFT

SEQ ID NO: 92232 - protein, 23 aa, Severe acute respiratory syndrome coronavirus 2
FKWDLTAFGLVAEWFLAYILFTR

SEQ ID NO: 92233 - protein, 23 aa, Severe acute respiratory syndrome coronavirus 2
KWDLTAFGLVAEWFLAYILFTRF

SEQ ID NO: 92234 - protein, 23 aa, Severe acute respiratory syndrome coronavirus 2
WDLTAFGLVAEWFLAYILFTRFF

SEQ ID NO: 92235 - protein, 23 aa, Severe acute respiratory syndrome coronavirus 2
DLTAFGLVAEWFLAYILFTRFFY

SEQ ID NO: 92236 - protein, 23 aa, Severe acute respiratory syndrome coronavirus 2
FGLVAEWFLAYILFTRFFYVLGL

SEQ ID NO: 92237 - protein, 23 aa, Severe acute respiratory syndrome coronavirus 2
GLVAEWFLAYILFTRFFYVLGLA

SEQ ID NO: 92238 - protein, 23 aa, Severe acute respiratory syndrome coronavirus 2
LVAEWFLAYILFTRFFYVLGLAA

SEQ ID NO: 92239 - protein, 23 aa, Severe acute respiratory syndrome coronavirus 2
VAEWFLAYILFTRFFYVLGLAAI

SEQ ID NO: 92240 - protein, 23 aa, Severe acute respiratory syndrome coronavirus 2
AEWFLAYILFTRFFYVLGLAAIM

SEQ ID NO: 92241 - protein, 23 aa, Severe acute respiratory syndrome coronavirus 2
EWFLAYILFTRFFYVLGLAAIMQ

SEQ ID NO: 92242 - protein, 23 aa, Severe acute respiratory syndrome coronavirus 2
FFSYFAVHFISNSWLMWLIINLV

SEQ ID NO: 92243 - protein, 23 aa, Severe acute respiratory syndrome coronavirus 2
FSYFAVHFISNSWLMWLIINLVQ

SEQ ID NO: 92244 - protein, 23 aa, Severe acute respiratory syndrome coronavirus 2
SYFAVHFISNSWLMWLIINLVQM

SEQ ID NO: 92245 - protein, 23 aa, Severe acute respiratory syndrome coronavirus 2
YFAVHFISNSWLMWLIINLVQMA

SEQ ID NO: 92246 - protein, 23 aa, Severe acute respiratory syndrome coronavirus 2
AMVRMYIFFASFYYVWKSYVHVV

SEQ ID NO: 92247 - protein, 23 aa, Severe acute respiratory syndrome coronavirus 2
MVRMYIFFASFYYVWKSYVHVVD

SEQ ID NO: 92248 - protein, 23 aa, Severe acute respiratory syndrome coronavirus 2
SSTCMMCYKRNRATRVECTTIVN

SEQ ID NO: 92249 - protein, 23 aa, Severe acute respiratory syndrome coronavirus 2
STCMMCYKRNRATRVECTTIVNG

SEQ ID NO: 92250 - protein, 23 aa, Severe acute respiratory syndrome coronavirus 2
TCMMCYKRNRATRVECTTIVNGV

SEQ ID NO: 92251 - protein, 23 aa, Severe acute respiratory syndrome coronavirus 2
CMMCYKRNRATRVECTTIVNGVR

SEQ ID NO: 92252 - protein, 23 aa, Severe acute respiratory syndrome coronavirus 2
SFYVYANGGKGFCKLHNWNCVNC

SEQ ID NO: 92253 - protein, 23 aa, Severe acute respiratory syndrome coronavirus 2
FYVYANGGKGFCKLHNWNCVNCD

SEQ ID NO: 92254 - protein, 23 aa, Severe acute respiratory syndrome coronavirus 2
YVYANGGKGFCKLHNWNCVNCDT

SEQ ID NO: 92255 - protein, 23 aa, Severe acute respiratory syndrome coronavirus 2
VYANGGKGFCKLHNWNCVNCDTF

SEQ ID NO: 92256 - protein, 23 aa, Severe acute respiratory syndrome coronavirus 2
YANGGKGFCKLHNWNCVNCDTFC

SEQ ID NO: 92257 - protein, 23 aa, Severe acute respiratory syndrome coronavirus 2
ANGGKGFCKLHNWNCVNCDTFCA

SEQ ID NO: 92258 - protein, 23 aa, Severe acute respiratory syndrome coronavirus 2
NGGKGFCKLHNWNCVNCDTFCAG

SEQ ID NO: 92259 - protein, 23 aa, Severe acute respiratory syndrome coronavirus 2
GGKGFCKLHNWNCVNCDTFCAGS

SEQ ID NO: 92260 - protein, 23 aa, Severe acute respiratory syndrome coronavirus 2
CKLHNWNCVNCDTFCAGSTFISD

SEQ ID NO: 92261 - protein, 23 aa, Severe acute respiratory syndrome coronavirus 2
KLHNWNCVNCDTFCAGSTFISDE

SEQ ID NO: 92262 - protein, 23 aa, Severe acute respiratory syndrome coronavirus 2
LHNWNCVNCDTFCAGSTFISDEV

SEQ ID NO: 92263 - protein, 23 aa, Severe acute respiratory syndrome coronavirus 2
HNWNCVNCDTFCAGSTFISDEVA

SEQ ID NO: 92264 - protein, 23 aa, Severe acute respiratory syndrome coronavirus 2
NWNCVNCDTFCAGSTFISDEVAR

SEQ ID NO: 92265 - protein, 23 aa, Severe acute respiratory syndrome coronavirus 2
WNCVNCDTFCAGSTFISDEVARD

SEQ ID NO: 92266 - protein, 23 aa, Severe acute respiratory syndrome coronavirus 2
NCVNCDTFCAGSTFISDEVARDL

SEQ ID NO: 92267 - protein, 23 aa, Severe acute respiratory syndrome coronavirus 2
CVNCDTFCAGSTFISDEVARDLS

SEQ ID NO: 92268 - protein, 23 aa, Severe acute respiratory syndrome coronavirus 2
VNCDTFCAGSTFISDEVARDLSL

SEQ ID NO: 92269 - protein, 23 aa, Severe acute respiratory syndrome coronavirus 2
NCDTFCAGSTFISDEVARDLSLQ

SEQ ID NO: 92270 - protein, 23 aa, Severe acute respiratory syndrome coronavirus 2
CDTFCAGSTFISDEVARDLSLQF

SEQ ID NO: 92271 - protein, 23 aa, Severe acute respiratory syndrome coronavirus 2
DTFCAGSTFISDEVARDLSLQFK

SEQ ID NO: 92272 - protein, 23 aa, Severe acute respiratory syndrome coronavirus 2
TFCAGSTFISDEVARDLSLQFKR

SEQ ID NO: 92273 - protein, 23 aa, Severe acute respiratory syndrome coronavirus 2
FCAGSTFISDEVARDLSLQFKRP

SEQ ID NO: 92274 - protein, 23 aa, Severe acute respiratory syndrome coronavirus 2
CAGSTFISDEVARDLSLQFKRPI

SEQ ID NO: 92275 - protein, 23 aa, Severe acute respiratory syndrome coronavirus 2
SASVYYSQLMCQPILLLDQALVS

SEQ ID NO: 92276 - protein, 23 aa, Severe acute respiratory syndrome coronavirus 2
LDNVLSTFISAARQGFVDSDVET

SEQ ID NO: 92277 - protein, 23 aa, Severe acute respiratory syndrome coronavirus 2
DNVLSTFISAARQGFVDSDVETK

SEQ ID NO: 92278 - protein, 23 aa, Severe acute respiratory syndrome coronavirus 2
NVLSTFISAARQGFVDSDVETKD

SEQ ID NO: 92279 - protein, 23 aa, Severe acute respiratory syndrome coronavirus 2
VLSTFISAARQGFVDSDVETKDV

SEQ ID NO: 92280 - protein, 23 aa, Severe acute respiratory syndrome coronavirus 2
LSTFISAARQGFVDSDVETKDVV

SEQ ID NO: 92281 - protein, 23 aa, Severe acute respiratory syndrome coronavirus 2
STFISAARQGFVDSDVETKDVVE

SEQ ID NO: 92282 - protein, 23 aa, Severe acute respiratory syndrome coronavirus 2
TFISAARQGFVDSDVETKDVVEC

SEQ ID NO: 92283 - protein, 23 aa, Severe acute respiratory syndrome coronavirus 2
FISAARQGFVDSDVETKDVVECL

SEQ ID NO: 92284 - protein, 23 aa, Severe acute respiratory syndrome coronavirus 2
ISAARQGFVDSDVETKDVVECLK

SEQ ID NO: 92285 - protein, 23 aa, Severe acute respiratory syndrome coronavirus 2
AARQGFVDSDVETKDVVECLKLS

SEQ ID NO: 92286 - protein, 23 aa, Severe acute respiratory syndrome coronavirus 2
ARQGFVDSDVETKDVVECLKLSH

SEQ ID NO: 92287 - protein, 23 aa, Severe acute respiratory syndrome coronavirus 2
RQGFVDSDVETKDVVECLKLSHQ

SEQ ID NO: 92288 - protein, 23 aa, Severe acute respiratory syndrome coronavirus 2
FVDSDVETKDVVECLKLSHQSDI

SEQ ID NO: 92289 - protein, 23 aa, Severe acute respiratory syndrome coronavirus 2
VDSDVETKDVVECLKLSHQSDIE

SEQ ID NO: 92290 - protein, 23 aa, Severe acute respiratory syndrome coronavirus 2
DSDVETKDVVECLKLSHQSDIEV

SEQ ID NO: 92291 - protein, 23 aa, Severe acute respiratory syndrome coronavirus 2
SDVETKDVVECLKLSHQSDIEVT

SEQ ID NO: 92292 - protein, 23 aa, Severe acute respiratory syndrome coronavirus 2
DVETKDVVECLKLSHQSDIEVTG

SEQ ID NO: 92293 - protein, 23 aa, Severe acute respiratory syndrome coronavirus 2
VETKDVVECLKLSHQSDIEVTGD

SEQ ID NO: 92294 - protein, 23 aa, Severe acute respiratory syndrome coronavirus 2
ETKDVVECLKLSHQSDIEVTGDS

SEQ ID NO: 92295 - protein, 23 aa, Severe acute respiratory syndrome coronavirus 2
SLSEQLRKQIRSAAKKNNLPFKL

SEQ ID NO: 92296 - protein, 23 aa, Severe acute respiratory syndrome coronavirus 2
LSEQLRKQIRSAAKKNNLPFKLT

SEQ ID NO: 92297 - protein, 23 aa, Severe acute respiratory syndrome coronavirus 2
SEQLRKQIRSAAKKNNLPFKLTC

SEQ ID NO: 92298 - protein, 23 aa, Severe acute respiratory syndrome coronavirus 2
QIRSAAKKNNLPFKLTCATTRQV

SEQ ID NO: 92299 - protein, 23 aa, Severe acute respiratory syndrome coronavirus 2
IRSAAKKNNLPFKLTCATTRQVV

SEQ ID NO: 92300 - protein, 23 aa, Severe acute respiratory syndrome coronavirus 2
RSAAKKNNLPFKLTCATTRQVVN

SEQ ID NO: 92301 - protein, 23 aa, Severe acute respiratory syndrome coronavirus 2
SAAKKNNLPFKLTCATTRQVVNV

SEQ ID NO: 92302 - protein, 23 aa, Severe acute respiratory syndrome coronavirus 2
AAKKNNLPFKLTCATTRQVVNVV

SEQ ID NO: 92303 - protein, 23 aa, Severe acute respiratory syndrome coronavirus 2
AKKNNLPFKLTCATTRQVVNVVT

SEQ ID NO: 92304 - protein, 23 aa, Severe acute respiratory syndrome coronavirus 2
KKNNLPFKLTCATTRQVVNVVTT

SEQ ID NO: 92305 - protein, 23 aa, Severe acute respiratory syndrome coronavirus 2
KNNLPFKLTCATTRQVVNVVTTK

SEQ ID NO: 92306 - protein, 23 aa, Severe acute respiratory syndrome coronavirus 2
NNLPFKLTCATTRQVVNVVTTKI

SEQ ID NO: 92307 - protein, 23 aa, Severe acute respiratory syndrome coronavirus 2
NLPFKLTCATTRQVVNVVTTKIA

SEQ ID NO: 92308 - protein, 23 aa, Severe acute respiratory syndrome coronavirus 2
LPFKLTCATTRQVVNVVTTKIAL

SEQ ID NO: 92309 - protein, 23 aa, Severe acute respiratory syndrome coronavirus 2
PFKLTCATTRQVVNVVTTKIALK

SEQ ID NO: 92310 - protein, 23 aa, Severe acute respiratory syndrome coronavirus 2
FKLTCATTRQVVNVVTTKIALKG

SEQ ID NO: 92311 - protein, 23 aa, Severe acute respiratory syndrome coronavirus 2
KLTCATTRQVVNVVTTKIALKGG

SEQ ID NO: 92312 - protein, 23 aa, Severe acute respiratory syndrome coronavirus 2
FDTWFSQRGGSYTNDKACPLIAA

SEQ ID NO: 92313 - protein, 23 aa, Severe acute respiratory syndrome coronavirus 2
DTWFSQRGGSYTNDKACPLIAAV

SEQ ID NO: 92314 - protein, 23 aa, Severe acute respiratory syndrome coronavirus 2
TWFSQRGGSYTNDKACPLIAAVI

SEQ ID NO: 92315 - protein, 23 aa, Severe acute respiratory syndrome coronavirus 2
WFSQRGGSYTNDKACPLIAAVIT

SEQ ID NO: 92316 - protein, 23 aa, Severe acute respiratory syndrome coronavirus 2
FSQRGGSYTNDKACPLIAAVITR

SEQ ID NO: 92317 - protein, 23 aa, Severe acute respiratory syndrome coronavirus 2
SQRGGSYTNDKACPLIAAVITRE

SEQ ID NO: 92318 - protein, 23 aa, Severe acute respiratory syndrome coronavirus 2
TTNGDFLHFLPRVFSAVGNICYT

SEQ ID NO: 92319 - protein, 23 aa, Severe acute respiratory syndrome coronavirus 2
TNGDFLHFLPRVFSAVGNICYTP

SEQ ID NO: 92320 - protein, 23 aa, Severe acute respiratory syndrome coronavirus 2
ATSACVLAAECTIFKDASGKPVP

SEQ ID NO: 92321 - protein, 23 aa, Severe acute respiratory syndrome coronavirus 2
TSACVLAAECTIFKDASGKPVPY

SEQ ID NO: 92322 - protein, 23 aa, Severe acute respiratory syndrome coronavirus 2
SACVLAAECTIFKDASGKPVPYC

SEQ ID NO: 92323 - protein, 23 aa, Severe acute respiratory syndrome coronavirus 2
ACVLAAECTIFKDASGKPVPYCY

SEQ ID NO: 92324 - protein, 23 aa, Severe acute respiratory syndrome coronavirus 2
CVLAAECTIFKDASGKPVPYCYD

SEQ ID NO: 92325 - protein, 23 aa, Severe acute respiratory syndrome coronavirus 2
VLAAECTIFKDASGKPVPYCYDT

SEQ ID NO: 92326 - protein, 23 aa, Severe acute respiratory syndrome coronavirus 2
LAAECTIFKDASGKPVPYCYDTN

SEQ ID NO: 92327 - protein, 23 aa, Severe acute respiratory syndrome coronavirus 2
AAECTIFKDASGKPVPYCYDTNV

SEQ ID NO: 92328 - protein, 23 aa, Severe acute respiratory syndrome coronavirus 2
IFKDASGKPVPYCYDTNVLEGSV

SEQ ID NO: 92329 - protein, 23 aa, Severe acute respiratory syndrome coronavirus 2
FKDASGKPVPYCYDTNVLEGSVA

SEQ ID NO: 92330 - protein, 23 aa, Severe acute respiratory syndrome coronavirus 2
KDASGKPVPYCYDTNVLEGSVAY

SEQ ID NO: 92331 - protein, 23 aa, Severe acute respiratory syndrome coronavirus 2
DASGKPVPYCYDTNVLEGSVAYE

SEQ ID NO: 92332 - protein, 23 aa, Severe acute respiratory syndrome coronavirus 2
ASGKPVPYCYDTNVLEGSVAYES

SEQ ID NO: 92333 - protein, 23 aa, Severe acute respiratory syndrome coronavirus 2
SGKPVPYCYDTNVLEGSVAYESL

SEQ ID NO: 92334 - protein, 23 aa, Severe acute respiratory syndrome coronavirus 2
GKPVPYCYDTNVLEGSVAYESLR

SEQ ID NO: 92335 - protein, 23 aa, Severe acute respiratory syndrome coronavirus 2
KPVPYCYDTNVLEGSVAYESLRP

SEQ ID NO: 92336 - protein, 23 aa, Severe acute respiratory syndrome coronavirus 2
PVPYCYDTNVLEGSVAYESLRPD

SEQ ID NO: 92337 - protein, 23 aa, Severe acute respiratory syndrome coronavirus 2
VPYCYDTNVLEGSVAYESLRPDT

SEQ ID NO: 92338 - protein, 23 aa, Severe acute respiratory syndrome coronavirus 2
PYCYDTNVLEGSVAYESLRPDTR

SEQ ID NO: 92339 - protein, 23 aa, Severe acute respiratory syndrome coronavirus 2
YCYDTNVLEGSVAYESLRPDTRY

SEQ ID NO: 92340 - protein, 23 aa, Severe acute respiratory syndrome coronavirus 2
CYDTNVLEGSVAYESLRPDTRYV

SEQ ID NO: 92341 - protein, 23 aa, Severe acute respiratory syndrome coronavirus 2
YDTNVLEGSVAYESLRPDTRYVL

SEQ ID NO: 92342 - protein, 23 aa, Severe acute respiratory syndrome coronavirus 2
DTNVLEGSVAYESLRPDTRYVLM

SEQ ID NO: 92343 - protein, 23 aa, Severe acute respiratory syndrome coronavirus 2
TNVLEGSVAYESLRPDTRYVLMD

SEQ ID NO: 92344 - protein, 23 aa, Severe acute respiratory syndrome coronavirus 2
GVCVSTSGRWVLNNDYYRSLPGV

SEQ ID NO: 92345 - protein, 23 aa, Severe acute respiratory syndrome coronavirus 2
VCVSTSGRWVLNNDYYRSLPGVF

SEQ ID NO: 92346 - protein, 23 aa, Severe acute respiratory syndrome coronavirus 2
CVSTSGRWVLNNDYYRSLPGVFC

SEQ ID NO: 92347 - protein, 23 aa, Severe acute respiratory syndrome coronavirus 2
VSTSGRWVLNNDYYRSLPGVFCG

SEQ ID NO: 92348 - protein, 23 aa, Severe acute respiratory syndrome coronavirus 2
STSGRWVLNNDYYRSLPGVFCGV

SEQ ID NO: 92349 - protein, 23 aa, Severe acute respiratory syndrome coronavirus 2
FLPGVYSVIYLYLTFYLTNDVSF

SEQ ID NO: 92350 - protein, 23 aa, Severe acute respiratory syndrome coronavirus 2
LPGVYSVIYLYLTFYLTNDVSFL

SEQ ID NO: 92351 - protein, 23 aa, Severe acute respiratory syndrome coronavirus 2
YLYLTFYLTNDVSFLAHIQWMVM

SEQ ID NO: 92352 - protein, 23 aa, Severe acute respiratory syndrome coronavirus 2
YIICISTKHFYWFFSNYLKRRVV

SEQ ID NO: 92353 - protein, 23 aa, Severe acute respiratory syndrome coronavirus 2
IICISTKHFYWFFSNYLKRRVVF

SEQ ID NO: 92354 - protein, 23 aa, Severe acute respiratory syndrome coronavirus 2
ICISTKHFYWFFSNYLKRRVVFN

SEQ ID NO: 92355 - protein, 23 aa, Severe acute respiratory syndrome coronavirus 2
CISTKHFYWFFSNYLKRRVVFNG

SEQ ID NO: 92356 - protein, 23 aa, Severe acute respiratory syndrome coronavirus 2
ISTKHFYWFFSNYLKRRVVFNGV

SEQ ID NO: 92357 - protein, 23 aa, Severe acute respiratory syndrome coronavirus 2
STKHFYWFFSNYLKRRVVFNGVS

SEQ ID NO: 92358 - protein, 23 aa, Severe acute respiratory syndrome coronavirus 2
TKHFYWFFSNYLKRRVVFNGVSF

SEQ ID NO: 92359 - protein, 23 aa, Severe acute respiratory syndrome coronavirus 2
KHFYWFFSNYLKRRVVFNGVSFS

SEQ ID NO: 92360 - protein, 23 aa, Severe acute respiratory syndrome coronavirus 2
HFYWFFSNYLKRRVVFNGVSFST

SEQ ID NO: 92361 - protein, 23 aa, Severe acute respiratory syndrome coronavirus 2
FYWFFSNYLKRRVVFNGVSFSTF

SEQ ID NO: 92362 - protein, 23 aa, Severe acute respiratory syndrome coronavirus 2
YWFFSNYLKRRVVFNGVSFSTFE

SEQ ID NO: 92363 - protein, 23 aa, Severe acute respiratory syndrome coronavirus 2
WFFSNYLKRRVVFNGVSFSTFEE

SEQ ID NO: 92364 - protein, 23 aa, Severe acute respiratory syndrome coronavirus 2
FFSNYLKRRVVFNGVSFSTFEEA

SEQ ID NO: 92365 - protein, 23 aa, Severe acute respiratory syndrome coronavirus 2
FSNYLKRRVVFNGVSFSTFEEAA

SEQ ID NO: 92366 - protein, 23 aa, Severe acute respiratory syndrome coronavirus 2
SNYLKRRVVFNGVSFSTFEEAAL

SEQ ID NO: 92367 - protein, 23 aa, Severe acute respiratory syndrome coronavirus 2
NYLKRRVVFNGVSFSTFEEAALC

SEQ ID NO: 92368 - protein, 23 aa, Severe acute respiratory syndrome coronavirus 2
YLKRRVVFNGVSFSTFEEAALCT

SEQ ID NO: 92369 - protein, 23 aa, Severe acute respiratory syndrome coronavirus 2
LKRRVVFNGVSFSTFEEAALCTF

SEQ ID NO: 92370 - protein, 23 aa, Severe acute respiratory syndrome coronavirus 2
KRRVVFNGVSFSTFEEAALCTFL

SEQ ID NO: 92371 - protein, 23 aa, Severe acute respiratory syndrome coronavirus 2
RRVVFNGVSFSTFEEAALCTFLL

SEQ ID NO: 92372 - protein, 23 aa, Severe acute respiratory syndrome coronavirus 2
RVVFNGVSFSTFEEAALCTFLLN

SEQ ID NO: 92373 - protein, 23 aa, Severe acute respiratory syndrome coronavirus 2
VVFNGVSFSTFEEAALCTFLLNK

SEQ ID NO: 92374 - protein, 23 aa, Severe acute respiratory syndrome coronavirus 2
VFNGVSFSTFEEAALCTFLLNKE

SEQ ID NO: 92375 - protein, 23 aa, Severe acute respiratory syndrome coronavirus 2
FNGVSFSTFEEAALCTFLLNKEM

SEQ ID NO: 92376 - protein, 23 aa, Severe acute respiratory syndrome coronavirus 2
NGVSFSTFEEAALCTFLLNKEMY

SEQ ID NO: 92377 - protein, 23 aa, Severe acute respiratory syndrome coronavirus 2
GVSFSTFEEAALCTFLLNKEMYL

SEQ ID NO: 92378 - protein, 23 aa, Severe acute respiratory syndrome coronavirus 2
VSFSTFEEAALCTFLLNKEMYLK

SEQ ID NO: 92379 - protein, 23 aa, Severe acute respiratory syndrome coronavirus 2
SFSTFEEAALCTFLLNKEMYLKL

SEQ ID NO: 92380 - protein, 23 aa, Severe acute respiratory syndrome coronavirus 2
FSTFEEAALCTFLLNKEMYLKLR

SEQ ID NO: 92381 - protein, 23 aa, Severe acute respiratory syndrome coronavirus 2
STFEEAALCTFLLNKEMYLKLRS

SEQ ID NO: 92382 - protein, 23 aa, Severe acute respiratory syndrome coronavirus 2
TFEEAALCTFLLNKEMYLKLRSD

SEQ ID NO: 92383 - protein, 23 aa, Severe acute respiratory syndrome coronavirus 2
FEEAALCTFLLNKEMYLKLRSDV

SEQ ID NO: 92384 - protein, 23 aa, Severe acute respiratory syndrome coronavirus 2
EEAALCTFLLNKEMYLKLRSDVL

SEQ ID NO: 92385 - protein, 23 aa, Severe acute respiratory syndrome coronavirus 2
EAALCTFLLNKEMYLKLRSDVLL

SEQ ID NO: 92386 - protein, 23 aa, Severe acute respiratory syndrome coronavirus 2
AALCTFLLNKEMYLKLRSDVLLP

SEQ ID NO: 92387 - protein, 23 aa, Severe acute respiratory syndrome coronavirus 2
CMVQVTCGTTTLNGLWLDDVVYC

SEQ ID NO: 92388 - protein, 23 aa, Severe acute respiratory syndrome coronavirus 2
MVQVTCGTTTLNGLWLDDVVYCP

SEQ ID NO: 92389 - protein, 23 aa, Severe acute respiratory syndrome coronavirus 2
VQVTCGTTTLNGLWLDDVVYCPR

SEQ ID NO: 92390 - protein, 23 aa, Severe acute respiratory syndrome coronavirus 2
QVTCGTTTLNGLWLDDVVYCPRH

SEQ ID NO: 92391 - protein, 23 aa, Severe acute respiratory syndrome coronavirus 2
VTCGTTTLNGLWLDDVVYCPRHV

SEQ ID NO: 92392 - protein, 23 aa, Severe acute respiratory syndrome coronavirus 2
TCGTTTLNGLWLDDVVYCPRHVI

SEQ ID NO: 92393 - protein, 23 aa, Severe acute respiratory syndrome coronavirus 2
CGTTTLNGLWLDDVVYCPRHVIC

SEQ ID NO: 92394 - protein, 23 aa, Severe acute respiratory syndrome coronavirus 2
SFCYMHHMELPTGVHAGTDLEGN

SEQ ID NO: 92395 - protein, 23 aa, Severe acute respiratory syndrome coronavirus 2
FCYMHHMELPTGVHAGTDLEGNF

SEQ ID NO: 92396 - protein, 23 aa, Severe acute respiratory syndrome coronavirus 2
TILGSALLEDEFTPFDVVRQCSG

SEQ ID NO: 92397 - protein, 23 aa, Severe acute respiratory syndrome coronavirus 2
ILGSALLEDEFTPFDVVRQCSGV

SEQ ID NO: 92398 - protein, 23 aa, Severe acute respiratory syndrome coronavirus 2
SAVKRTIKGTHHWLLLTILTSLL

SEQ ID NO: 92399 - protein, 23 aa, Severe acute respiratory syndrome coronavirus 2
AVKRTIKGTHHWLLLTILTSLLV

SEQ ID NO: 92400 - protein, 23 aa, Severe acute respiratory syndrome coronavirus 2
VKRTIKGTHHWLLLTILTSLLVL

SEQ ID NO: 92401 - protein, 23 aa, Severe acute respiratory syndrome coronavirus 2
KRTIKGTHHWLLLTILTSLLVLV

SEQ ID NO: 92402 - protein, 23 aa, Severe acute respiratory syndrome coronavirus 2
RTIKGTHHWLLLTILTSLLVLVQ

SEQ ID NO: 92403 - protein, 23 aa, Severe acute respiratory syndrome coronavirus 2
TIKGTHHWLLLTILTSLLVLVQS

SEQ ID NO: 92404 - protein, 23 aa, Severe acute respiratory syndrome coronavirus 2
IKGTHHWLLLTILTSLLVLVQST

SEQ ID NO: 92405 - protein, 23 aa, Severe acute respiratory syndrome coronavirus 2
KGTHHWLLLTILTSLLVLVQSTQ

SEQ ID NO: 92406 - protein, 23 aa, Severe acute respiratory syndrome coronavirus 2
GTHHWLLLTILTSLLVLVQSTQW

SEQ ID NO: 92407 - protein, 23 aa, Severe acute respiratory syndrome coronavirus 2
THHWLLLTILTSLLVLVQSTQWS

SEQ ID NO: 92408 - protein, 23 aa, Severe acute respiratory syndrome coronavirus 2
HHWLLLTILTSLLVLVQSTQWSL

SEQ ID NO: 92409 - protein, 23 aa, Severe acute respiratory syndrome coronavirus 2
HWLLLTILTSLLVLVQSTQWSLF

SEQ ID NO: 92410 - protein, 23 aa, Severe acute respiratory syndrome coronavirus 2
MGIIAMSAFAMMFVKHKHAFLCL

SEQ ID NO: 92411 - protein, 23 aa, Severe acute respiratory syndrome coronavirus 2
GIIAMSAFAMMFVKHKHAFLCLF

SEQ ID NO: 92412 - protein, 23 aa, Severe acute respiratory syndrome coronavirus 2
IIAMSAFAMMFVKHKHAFLCLFL

SEQ ID NO: 92413 - protein, 23 aa, Severe acute respiratory syndrome coronavirus 2
IAMSAFAMMFVKHKHAFLCLFLL

SEQ ID NO: 92414 - protein, 23 aa, Severe acute respiratory syndrome coronavirus 2
AMSAFAMMFVKHKHAFLCLFLLP

SEQ ID NO: 92415 - protein, 23 aa, Severe acute respiratory syndrome coronavirus 2
MSAFAMMFVKHKHAFLCLFLLPS

SEQ ID NO: 92416 - protein, 23 aa, Severe acute respiratory syndrome coronavirus 2
MVDTSLSGFKLKDCVMYASAVVL

SEQ ID NO: 92417 - protein, 23 aa, Severe acute respiratory syndrome coronavirus 2
VDTSLSGFKLKDCVMYASAVVLL

SEQ ID NO: 92418 - protein, 23 aa, Severe acute respiratory syndrome coronavirus 2
DTSLSGFKLKDCVMYASAVVLLI

SEQ ID NO: 92419 - protein, 23 aa, Severe acute respiratory syndrome coronavirus 2
TSLSGFKLKDCVMYASAVVLLIL

SEQ ID NO: 92420 - protein, 23 aa, Severe acute respiratory syndrome coronavirus 2
SLSGFKLKDCVMYASAVVLLILM

SEQ ID NO: 92421 - protein, 23 aa, Severe acute respiratory syndrome coronavirus 2
LSGFKLKDCVMYASAVVLLILMT

SEQ ID NO: 92422 - protein, 23 aa, Severe acute respiratory syndrome coronavirus 2
CYFGLFCLLNRYFRLTLGVYDYL

SEQ ID NO: 92423 - protein, 23 aa, Severe acute respiratory syndrome coronavirus 2
NRYFRLTLGVYDYLVSTQEFRYM

SEQ ID NO: 92424 - protein, 23 aa, Severe acute respiratory syndrome coronavirus 2
RYFRLTLGVYDYLVSTQEFRYMN

SEQ ID NO: 92425 - protein, 23 aa, Severe acute respiratory syndrome coronavirus 2
YFRLTLGVYDYLVSTQEFRYMNS

SEQ ID NO: 92426 - protein, 23 aa, Severe acute respiratory syndrome coronavirus 2
FRLTLGVYDYLVSTQEFRYMNSQ

SEQ ID NO: 92427 - protein, 23 aa, Severe acute respiratory syndrome coronavirus 2
RLTLGVYDYLVSTQEFRYMNSQG

SEQ ID NO: 92428 - protein, 23 aa, Severe acute respiratory syndrome coronavirus 2
LTLGVYDYLVSTQEFRYMNSQGL

SEQ ID NO: 92429 - protein, 23 aa, Severe acute respiratory syndrome coronavirus 2
SKMSDVKCTSVVLLSVLQQLRVE

SEQ ID NO: 92430 - protein, 23 aa, Severe acute respiratory syndrome coronavirus 2
KMSDVKCTSVVLLSVLQQLRVES

SEQ ID NO: 92431 - protein, 23 aa, Severe acute respiratory syndrome coronavirus 2
VQLHNDILLAKDTTEAFEKMVSL

SEQ ID NO: 92432 - protein, 23 aa, Severe acute respiratory syndrome coronavirus 2
QLHNDILLAKDTTEAFEKMVSLL

SEQ ID NO: 92433 - protein, 23 aa, Severe acute respiratory syndrome coronavirus 2
LHNDILLAKDTTEAFEKMVSLLS

SEQ ID NO: 92434 - protein, 23 aa, Severe acute respiratory syndrome coronavirus 2
LLSMQGAVDINKLCEEMLDNRAT

SEQ ID NO: 92435 - protein, 23 aa, Severe acute respiratory syndrome coronavirus 2
LSMQGAVDINKLCEEMLDNRATL

SEQ ID NO: 92436 - protein, 23 aa, Severe acute respiratory syndrome coronavirus 2
SMQGAVDINKLCEEMLDNRATLQ

SEQ ID NO: 92437 - protein, 23 aa, Severe acute respiratory syndrome coronavirus 2
AMQRKLEKMADQAMTQMYKQARS

SEQ ID NO: 92438 - protein, 23 aa, Severe acute respiratory syndrome coronavirus 2
MQRKLEKMADQAMTQMYKQARSE

SEQ ID NO: 92439 - protein, 23 aa, Severe acute respiratory syndrome coronavirus 2
QRKLEKMADQAMTQMYKQARSED

SEQ ID NO: 92440 - protein, 23 aa, Severe acute respiratory syndrome coronavirus 2
RKLEKMADQAMTQMYKQARSEDK

SEQ ID NO: 92441 - protein, 23 aa, Severe acute respiratory syndrome coronavirus 2
KLEKMADQAMTQMYKQARSEDKR

SEQ ID NO: 92442 - protein, 23 aa, Severe acute respiratory syndrome coronavirus 2
LEKMADQAMTQMYKQARSEDKRA

SEQ ID NO: 92443 - protein, 23 aa, Severe acute respiratory syndrome coronavirus 2
EKMADQAMTQMYKQARSEDKRAK

SEQ ID NO: 92444 - protein, 23 aa, Severe acute respiratory syndrome coronavirus 2
KMADQAMTQMYKQARSEDKRAKV

SEQ ID NO: 92445 - protein, 23 aa, Severe acute respiratory syndrome coronavirus 2
MADQAMTQMYKQARSEDKRAKVT

SEQ ID NO: 92446 - protein, 23 aa, Severe acute respiratory syndrome coronavirus 2
ADQAMTQMYKQARSEDKRAKVTS

SEQ ID NO: 92447 - protein, 23 aa, Severe acute respiratory syndrome coronavirus 2
DQAMTQMYKQARSEDKRAKVTSA

SEQ ID NO: 92448 - protein, 23 aa, Severe acute respiratory syndrome coronavirus 2
QAMTQMYKQARSEDKRAKVTSAM

SEQ ID NO: 92449 - protein, 23 aa, Severe acute respiratory syndrome coronavirus 2
AMTQMYKQARSEDKRAKVTSAMQ

SEQ ID NO: 92450 - protein, 23 aa, Severe acute respiratory syndrome coronavirus 2
TQMYKQARSEDKRAKVTSAMQTM

SEQ ID NO: 92451 - protein, 23 aa, Severe acute respiratory syndrome coronavirus 2
QMYKQARSEDKRAKVTSAMQTML

SEQ ID NO: 92452 - protein, 23 aa, Severe acute respiratory syndrome coronavirus 2
MYKQARSEDKRAKVTSAMQTMLF

SEQ ID NO: 92453 - protein, 23 aa, Severe acute respiratory syndrome coronavirus 2
YKQARSEDKRAKVTSAMQTMLFT

SEQ ID NO: 92454 - protein, 23 aa, Severe acute respiratory syndrome coronavirus 2
KQARSEDKRAKVTSAMQTMLFTM

SEQ ID NO: 92455 - protein, 23 aa, Severe acute respiratory syndrome coronavirus 2
QARSEDKRAKVTSAMQTMLFTML

SEQ ID NO: 92456 - protein, 23 aa, Severe acute respiratory syndrome coronavirus 2
ARSEDKRAKVTSAMQTMLFTMLR

SEQ ID NO: 92457 - protein, 23 aa, Severe acute respiratory syndrome coronavirus 2
RSEDKRAKVTSAMQTMLFTMLRK

SEQ ID NO: 92458 - protein, 23 aa, Severe acute respiratory syndrome coronavirus 2
SEDKRAKVTSAMQTMLFTMLRKL

SEQ ID NO: 92459 - protein, 23 aa, Severe acute respiratory syndrome coronavirus 2
EDKRAKVTSAMQTMLFTMLRKLD

SEQ ID NO: 92460 - protein, 23 aa, Severe acute respiratory syndrome coronavirus 2
DKRAKVTSAMQTMLFTMLRKLDN

SEQ ID NO: 92461 - protein, 23 aa, Severe acute respiratory syndrome coronavirus 2
RKLDNDALNNIINNARDGCVPLN

SEQ ID NO: 92462 - protein, 23 aa, Severe acute respiratory syndrome coronavirus 2
KLDNDALNNIINNARDGCVPLNI

SEQ ID NO: 92463 - protein, 23 aa, Severe acute respiratory syndrome coronavirus 2
LDNDALNNIINNARDGCVPLNII

SEQ ID NO: 92464 - protein, 23 aa, Severe acute respiratory syndrome coronavirus 2
DNDALNNIINNARDGCVPLNIIP

SEQ ID NO: 92465 - protein, 23 aa, Severe acute respiratory syndrome coronavirus 2
NDALNNIINNARDGCVPLNIIPL

SEQ ID NO: 92466 - protein, 23 aa, Severe acute respiratory syndrome coronavirus 2
VDADSKIVQLSEISMDNSPNLAW

SEQ ID NO: 92467 - protein, 23 aa, Severe acute respiratory syndrome coronavirus 2
DADSKIVQLSEISMDNSPNLAWP

SEQ ID NO: 92468 - protein, 23 aa, Severe acute respiratory syndrome coronavirus 2
ADSKIVQLSEISMDNSPNLAWPL

SEQ ID NO: 92469 - protein, 23 aa, Severe acute respiratory syndrome coronavirus 2
DSKIVQLSEISMDNSPNLAWPLI

SEQ ID NO: 92470 - protein, 23 aa, Severe acute respiratory syndrome coronavirus 2
SKIVQLSEISMDNSPNLAWPLIV

SEQ ID NO: 92471 - protein, 23 aa, Severe acute respiratory syndrome coronavirus 2
PCRFVTDTPKGPKVKYLYFIKGL

SEQ ID NO: 92472 - protein, 23 aa, Severe acute respiratory syndrome coronavirus 2
CRFVTDTPKGPKVKYLYFIKGLN

SEQ ID NO: 92473 - protein, 23 aa, Severe acute respiratory syndrome coronavirus 2
RFVTDTPKGPKVKYLYFIKGLNN

SEQ ID NO: 92474 - protein, 23 aa, Severe acute respiratory syndrome coronavirus 2
FVTDTPKGPKVKYLYFIKGLNNL

SEQ ID NO: 92475 - protein, 23 aa, Severe acute respiratory syndrome coronavirus 2
VTDTPKGPKVKYLYFIKGLNNLN

SEQ ID NO: 92476 - protein, 23 aa, Severe acute respiratory syndrome coronavirus 2
TDTPKGPKVKYLYFIKGLNNLNR

SEQ ID NO: 92477 - protein, 23 aa, Severe acute respiratory syndrome coronavirus 2
DTPKGPKVKYLYFIKGLNNLNRG

SEQ ID NO: 92478 - protein, 23 aa, Severe acute respiratory syndrome coronavirus 2
TPKGPKVKYLYFIKGLNNLNRGM

SEQ ID NO: 92479 - protein, 23 aa, Severe acute respiratory syndrome coronavirus 2
PKGPKVKYLYFIKGLNNLNRGMV

SEQ ID NO: 92480 - protein, 23 aa, Severe acute respiratory syndrome coronavirus 2
KGPKVKYLYFIKGLNNLNRGMVL

SEQ ID NO: 92481 - protein, 23 aa, Severe acute respiratory syndrome coronavirus 2
VLSFCAFAVDAAKAYKDYLASGG

SEQ ID NO: 92482 - protein, 23 aa, Severe acute respiratory syndrome coronavirus 2
LSFCAFAVDAAKAYKDYLASGGQ

SEQ ID NO: 92483 - protein, 23 aa, Severe acute respiratory syndrome coronavirus 2
VDAAKAYKDYLASGGQPITNCVK

SEQ ID NO: 92484 - protein, 23 aa, Severe acute respiratory syndrome coronavirus 2
DAAKAYKDYLASGGQPITNCVKM

SEQ ID NO: 92485 - protein, 23 aa, Severe acute respiratory syndrome coronavirus 2
AAKAYKDYLASGGQPITNCVKML

SEQ ID NO: 92486 - protein, 23 aa, Severe acute respiratory syndrome coronavirus 2
AKAYKDYLASGGQPITNCVKMLC

SEQ ID NO: 92487 - protein, 23 aa, Severe acute respiratory syndrome coronavirus 2
KAYKDYLASGGQPITNCVKMLCT

SEQ ID NO: 92488 - protein, 23 aa, Severe acute respiratory syndrome coronavirus 2
AYKDYLASGGQPITNCVKMLCTH

SEQ ID NO: 92489 - protein, 24 aa, Severe acute respiratory syndrome coronavirus 2
TCGLVEVEKGVLPQLEQPYVFIKR

SEQ ID NO: 92490 - protein, 24 aa, Severe acute respiratory syndrome coronavirus 2
VYCCREHEHEIAWYTERSEKSYEL

SEQ ID NO: 92491 - protein, 24 aa, Severe acute respiratory syndrome coronavirus 2
YCCREHEHEIAWYTERSEKSYELQ

SEQ ID NO: 92492 - protein, 24 aa, Severe acute respiratory syndrome coronavirus 2
CCREHEHEIAWYTERSEKSYELQT

SEQ ID NO: 92493 - protein, 24 aa, Severe acute respiratory syndrome coronavirus 2
CREHEHEIAWYTERSEKSYELQTP

SEQ ID NO: 92494 - protein, 24 aa, Severe acute respiratory syndrome coronavirus 2
REHEHEIAWYTERSEKSYELQTPF

SEQ ID NO: 92495 - protein, 24 aa, Severe acute respiratory syndrome coronavirus 2
EHEHEIAWYTERSEKSYELQTPFE

SEQ ID NO: 92496 - protein, 24 aa, Severe acute respiratory syndrome coronavirus 2
HEHEIAWYTERSEKSYELQTPFEI

SEQ ID NO: 92497 - protein, 24 aa, Severe acute respiratory syndrome coronavirus 2
EHEIAWYTERSEKSYELQTPFEIK

SEQ ID NO: 92498 - protein, 24 aa, Severe acute respiratory syndrome coronavirus 2
HEIAWYTERSEKSYELQTPFEIKL

SEQ ID NO: 92499 - protein, 24 aa, Severe acute respiratory syndrome coronavirus 2
EIAWYTERSEKSYELQTPFEIKLA

SEQ ID NO: 92500 - protein, 24 aa, Severe acute respiratory syndrome coronavirus 2
IAWYTERSEKSYELQTPFEIKLAK

SEQ ID NO: 92501 - protein, 24 aa, Severe acute respiratory syndrome coronavirus 2
AWYTERSEKSYELQTPFEIKLAKK

SEQ ID NO: 92502 - protein, 24 aa, Severe acute respiratory syndrome coronavirus 2
WYTERSEKSYELQTPFEIKLAKKF

SEQ ID NO: 92503 - protein, 24 aa, Severe acute respiratory syndrome coronavirus 2
YTERSEKSYELQTPFEIKLAKKFD

SEQ ID NO: 92504 - protein, 24 aa, Severe acute respiratory syndrome coronavirus 2
NKFLALCADSIIIGGAKLKALNLG

SEQ ID NO: 92505 - protein, 24 aa, Severe acute respiratory syndrome coronavirus 2
KFLALCADSIIIGGAKLKALNLGE

SEQ ID NO: 92506 - protein, 24 aa, Severe acute respiratory syndrome coronavirus 2
YITTYPGQGLNGYTVEEAKTVLKK

SEQ ID NO: 92507 - protein, 24 aa, Severe acute respiratory syndrome coronavirus 2
ITTYPGQGLNGYTVEEAKTVLKKC

SEQ ID NO: 92508 - protein, 24 aa, Severe acute respiratory syndrome coronavirus 2
TTYPGQGLNGYTVEEAKTVLKKCK

SEQ ID NO: 92509 - protein, 24 aa, Severe acute respiratory syndrome coronavirus 2
TYPGQGLNGYTVEEAKTVLKKCKS

SEQ ID NO: 92510 - protein, 24 aa, Severe acute respiratory syndrome coronavirus 2
TAYNGYLTSSSKTPEEHFIETISL

SEQ ID NO: 92511 - protein, 24 aa, Severe acute respiratory syndrome coronavirus 2
AYNGYLTSSSKTPEEHFIETISLA

SEQ ID NO: 92512 - protein, 24 aa, Severe acute respiratory syndrome coronavirus 2
YNGYLTSSSKTPEEHFIETISLAG

SEQ ID NO: 92513 - protein, 24 aa, Severe acute respiratory syndrome coronavirus 2
NGYLTSSSKTPEEHFIETISLAGS

SEQ ID NO: 92514 - protein, 24 aa, Severe acute respiratory syndrome coronavirus 2
GYLTSSSKTPEEHFIETISLAGSY

SEQ ID NO: 92515 - protein, 24 aa, Severe acute respiratory syndrome coronavirus 2
YLTSSSKTPEEHFIETISLAGSYK

SEQ ID NO: 92516 - protein, 24 aa, Severe acute respiratory syndrome coronavirus 2
LTSSSKTPEEHFIETISLAGSYKD

SEQ ID NO: 92517 - protein, 24 aa, Severe acute respiratory syndrome coronavirus 2
TSSSKTPEEHFIETISLAGSYKDW

SEQ ID NO: 92518 - protein, 24 aa, Severe acute respiratory syndrome coronavirus 2
KKWKYPQVNGLTSIKWADNNCYLA

SEQ ID NO: 92519 - protein, 24 aa, Severe acute respiratory syndrome coronavirus 2
KWKYPQVNGLTSIKWADNNCYLAT

SEQ ID NO: 92520 - protein, 24 aa, Severe acute respiratory syndrome coronavirus 2
ELKFNPPALQDAYYRARAGEAANF

SEQ ID NO: 92521 - protein, 24 aa, Severe acute respiratory syndrome coronavirus 2
LKFNPPALQDAYYRARAGEAANFC

SEQ ID NO: 92522 - protein, 24 aa, Severe acute respiratory syndrome coronavirus 2
KFNPPALQDAYYRARAGEAANFCA

SEQ ID NO: 92523 - protein, 24 aa, Severe acute respiratory syndrome coronavirus 2
FNPPALQDAYYRARAGEAANFCAL

SEQ ID NO: 92524 - protein, 24 aa, Severe acute respiratory syndrome coronavirus 2
LFQHANLDSCKRVLNVVCKTCGQQ

SEQ ID NO: 92525 - protein, 24 aa, Severe acute respiratory syndrome coronavirus 2
FQHANLDSCKRVLNVVCKTCGQQQ

SEQ ID NO: 92526 - protein, 24 aa, Severe acute respiratory syndrome coronavirus 2
QHANLDSCKRVLNVVCKTCGQQQT

SEQ ID NO: 92527 - protein, 24 aa, Severe acute respiratory syndrome coronavirus 2
DVFYKENSYTTTIKPVTYKLDGVV

SEQ ID NO: 92528 - protein, 24 aa, Severe acute respiratory syndrome coronavirus 2
VFYKENSYTTTIKPVTYKLDGVVC

SEQ ID NO: 92529 - protein, 24 aa, Severe acute respiratory syndrome coronavirus 2
KENSYTTTIKPVTYKLDGVVCTEI

SEQ ID NO: 92530 - protein, 24 aa, Severe acute respiratory syndrome coronavirus 2
ENSYTTTIKPVTYKLDGVVCTEID

SEQ ID NO: 92531 - protein, 24 aa, Severe acute respiratory syndrome coronavirus 2
NSYTTTIKPVTYKLDGVVCTEIDP

SEQ ID NO: 92532 - protein, 24 aa, Severe acute respiratory syndrome coronavirus 2
SYTTTIKPVTYKLDGVVCTEIDPK

SEQ ID NO: 92533 - protein, 24 aa, Severe acute respiratory syndrome coronavirus 2
YTTTIKPVTYKLDGVVCTEIDPKL

SEQ ID NO: 92534 - protein, 24 aa, Severe acute respiratory syndrome coronavirus 2
TTTIKPVTYKLDGVVCTEIDPKLD

SEQ ID NO: 92535 - protein, 24 aa, Severe acute respiratory syndrome coronavirus 2
TTIKPVTYKLDGVVCTEIDPKLDN

SEQ ID NO: 92536 - protein, 24 aa, Severe acute respiratory syndrome coronavirus 2
TIKPVTYKLDGVVCTEIDPKLDNY

SEQ ID NO: 92537 - protein, 24 aa, Severe acute respiratory syndrome coronavirus 2
IKPVTYKLDGVVCTEIDPKLDNYY

SEQ ID NO: 92538 - protein, 24 aa, Severe acute respiratory syndrome coronavirus 2
KPVTYKLDGVVCTEIDPKLDNYYK

SEQ ID NO: 92539 - protein, 24 aa, Severe acute respiratory syndrome coronavirus 2
PVTYKLDGVVCTEIDPKLDNYYKK

SEQ ID NO: 92540 - protein, 24 aa, Severe acute respiratory syndrome coronavirus 2
VVCTEIDPKLDNYYKKDNSYFTEQ

SEQ ID NO: 92541 - protein, 24 aa, Severe acute respiratory syndrome coronavirus 2
VCTEIDPKLDNYYKKDNSYFTEQP

SEQ ID NO: 92542 - protein, 24 aa, Severe acute respiratory syndrome coronavirus 2
CTEIDPKLDNYYKKDNSYFTEQPI

SEQ ID NO: 92543 - protein, 24 aa, Severe acute respiratory syndrome coronavirus 2
TEIDPKLDNYYKKDNSYFTEQPID

SEQ ID NO: 92544 - protein, 24 aa, Severe acute respiratory syndrome coronavirus 2
EIDPKLDNYYKKDNSYFTEQPIDL

SEQ ID NO: 92545 - protein, 24 aa, Severe acute respiratory syndrome coronavirus 2
IDPKLDNYYKKDNSYFTEQPIDLV

SEQ ID NO: 92546 - protein, 24 aa, Severe acute respiratory syndrome coronavirus 2
DPKLDNYYKKDNSYFTEQPIDLVP

SEQ ID NO: 92547 - protein, 24 aa, Severe acute respiratory syndrome coronavirus 2
PKLDNYYKKDNSYFTEQPIDLVPN

SEQ ID NO: 92548 - protein, 24 aa, Severe acute respiratory syndrome coronavirus 2
KLDNYYKKDNSYFTEQPIDLVPNQ

SEQ ID NO: 92549 - protein, 24 aa, Severe acute respiratory syndrome coronavirus 2
LDNYYKKDNSYFTEQPIDLVPNQP

SEQ ID NO: 92550 - protein, 24 aa, Severe acute respiratory syndrome coronavirus 2
DNYYKKDNSYFTEQPIDLVPNQPY

SEQ ID NO: 92551 - protein, 24 aa, Severe acute respiratory syndrome coronavirus 2
ASFDNFKFVCDNIKFADDLNQLTG

SEQ ID NO: 92552 - protein, 24 aa, Severe acute respiratory syndrome coronavirus 2
SFDNFKFVCDNIKFADDLNQLTGY

SEQ ID NO: 92553 - protein, 24 aa, Severe acute respiratory syndrome coronavirus 2
FDNFKFVCDNIKFADDLNQLTGYK

SEQ ID NO: 92554 - protein, 24 aa, Severe acute respiratory syndrome coronavirus 2
DNFKFVCDNIKFADDLNQLTGYKK

SEQ ID NO: 92555 - protein, 24 aa, Severe acute respiratory syndrome coronavirus 2
NFKFVCDNIKFADDLNQLTGYKKP

SEQ ID NO: 92556 - protein, 24 aa, Severe acute respiratory syndrome coronavirus 2
FKFVCDNIKFADDLNQLTGYKKPA

SEQ ID NO: 92557 - protein, 24 aa, Severe acute respiratory syndrome coronavirus 2
DLNQLTGYKKPASRELKVTFFPDL

SEQ ID NO: 92558 - protein, 24 aa, Severe acute respiratory syndrome coronavirus 2
LNQLTGYKKPASRELKVTFFPDLN

SEQ ID NO: 92559 - protein, 24 aa, Severe acute respiratory syndrome coronavirus 2
NQLTGYKKPASRELKVTFFPDLNG

SEQ ID NO: 92560 - protein, 24 aa, Severe acute respiratory syndrome coronavirus 2
QLTGYKKPASRELKVTFFPDLNGD

SEQ ID NO: 92561 - protein, 24 aa, Severe acute respiratory syndrome coronavirus 2
LTGYKKPASRELKVTFFPDLNGDV

SEQ ID NO: 92562 - protein, 24 aa, Severe acute respiratory syndrome coronavirus 2
TGYKKPASRELKVTFFPDLNGDVV

SEQ ID NO: 92563 - protein, 24 aa, Severe acute respiratory syndrome coronavirus 2
GYKKPASRELKVTFFPDLNGDVVA

SEQ ID NO: 92564 - protein, 24 aa, Severe acute respiratory syndrome coronavirus 2
YKKPASRELKVTFFPDLNGDVVAI

SEQ ID NO: 92565 - protein, 24 aa, Severe acute respiratory syndrome coronavirus 2
KKPASRELKVTFFPDLNGDVVAID

SEQ ID NO: 92566 - protein, 24 aa, Severe acute respiratory syndrome coronavirus 2
KPASRELKVTFFPDLNGDVVAIDY

SEQ ID NO: 92567 - protein, 24 aa, Severe acute respiratory syndrome coronavirus 2
PASRELKVTFFPDLNGDVVAIDYK

SEQ ID NO: 92568 - protein, 24 aa, Severe acute respiratory syndrome coronavirus 2
ASRELKVTFFPDLNGDVVAIDYKH

SEQ ID NO: 92569 - protein, 24 aa, Severe acute respiratory syndrome coronavirus 2
SRELKVTFFPDLNGDVVAIDYKHY

SEQ ID NO: 92570 - protein, 24 aa, Severe acute respiratory syndrome coronavirus 2
RELKVTFFPDLNGDVVAIDYKHYT

SEQ ID NO: 92571 - protein, 24 aa, Severe acute respiratory syndrome coronavirus 2
ELKVTFFPDLNGDVVAIDYKHYTP

SEQ ID NO: 92572 - protein, 24 aa, Severe acute respiratory syndrome coronavirus 2
LKVTFFPDLNGDVVAIDYKHYTPS

SEQ ID NO: 92573 - protein, 24 aa, Severe acute respiratory syndrome coronavirus 2
QITISSFKWDLTAFGLVAEWFLAY

SEQ ID NO: 92574 - protein, 24 aa, Severe acute respiratory syndrome coronavirus 2
ITISSFKWDLTAFGLVAEWFLAYI

SEQ ID NO: 92575 - protein, 24 aa, Severe acute respiratory syndrome coronavirus 2
TISSFKWDLTAFGLVAEWFLAYIL

SEQ ID NO: 92576 - protein, 24 aa, Severe acute respiratory syndrome coronavirus 2
ISSFKWDLTAFGLVAEWFLAYILF

SEQ ID NO: 92577 - protein, 24 aa, Severe acute respiratory syndrome coronavirus 2
SSFKWDLTAFGLVAEWFLAYILFT

SEQ ID NO: 92578 - protein, 24 aa, Severe acute respiratory syndrome coronavirus 2
SFKWDLTAFGLVAEWFLAYILFTR

SEQ ID NO: 92579 - protein, 24 aa, Severe acute respiratory syndrome coronavirus 2
FKWDLTAFGLVAEWFLAYILFTRF

SEQ ID NO: 92580 - protein, 24 aa, Severe acute respiratory syndrome coronavirus 2
KWDLTAFGLVAEWFLAYILFTRFF

SEQ ID NO: 92581 - protein, 24 aa, Severe acute respiratory syndrome coronavirus 2
WDLTAFGLVAEWFLAYILFTRFFY

SEQ ID NO: 92582 - protein, 24 aa, Severe acute respiratory syndrome coronavirus 2
FGLVAEWFLAYILFTRFFYVLGLA

SEQ ID NO: 92583 - protein, 24 aa, Severe acute respiratory syndrome coronavirus 2
GLVAEWFLAYILFTRFFYVLGLAA

SEQ ID NO: 92584 - protein, 24 aa, Severe acute respiratory syndrome coronavirus 2
LVAEWFLAYILFTRFFYVLGLAAI

SEQ ID NO: 92585 - protein, 24 aa, Severe acute respiratory syndrome coronavirus 2
VAEWFLAYILFTRFFYVLGLAAIM

SEQ ID NO: 92586 - protein, 24 aa, Severe acute respiratory syndrome coronavirus 2
AEWFLAYILFTRFFYVLGLAAIMQ

SEQ ID NO: 92587 - protein, 24 aa, Severe acute respiratory syndrome coronavirus 2
FFSYFAVHFISNSWLMWLIINLVQ

SEQ ID NO: 92588 - protein, 24 aa, Severe acute respiratory syndrome coronavirus 2
FSYFAVHFISNSWLMWLIINLVQM

SEQ ID NO: 92589 - protein, 24 aa, Severe acute respiratory syndrome coronavirus 2
SYFAVHFISNSWLMWLIINLVQMA

SEQ ID NO: 92590 - protein, 24 aa, Severe acute respiratory syndrome coronavirus 2
AMVRMYIFFASFYYVWKSYVHVVD

SEQ ID NO: 92591 - protein, 24 aa, Severe acute respiratory syndrome coronavirus 2
SSTCMMCYKRNRATRVECTTIVNG

SEQ ID NO: 92592 - protein, 24 aa, Severe acute respiratory syndrome coronavirus 2
STCMMCYKRNRATRVECTTIVNGV

SEQ ID NO: 92593 - protein, 24 aa, Severe acute respiratory syndrome coronavirus 2
SFYVYANGGKGFCKLHNWNCVNCD

SEQ ID NO: 92594 - protein, 24 aa, Severe acute respiratory syndrome coronavirus 2
FYVYANGGKGFCKLHNWNCVNCDT

SEQ ID NO: 92595 - protein, 24 aa, Severe acute respiratory syndrome coronavirus 2
YVYANGGKGFCKLHNWNCVNCDTF

SEQ ID NO: 92596 - protein, 24 aa, Severe acute respiratory syndrome coronavirus 2
VYANGGKGFCKLHNWNCVNCDTFC

SEQ ID NO: 92597 - protein, 24 aa, Severe acute respiratory syndrome coronavirus 2
YANGGKGFCKLHNWNCVNCDTFCA

SEQ ID NO: 92598 - protein, 24 aa, Severe acute respiratory syndrome coronavirus 2
ANGGKGFCKLHNWNCVNCDTFCAG

SEQ ID NO: 92599 - protein, 24 aa, Severe acute respiratory syndrome coronavirus 2
NGGKGFCKLHNWNCVNCDTFCAGS

SEQ ID NO: 92600 - protein, 24 aa, Severe acute respiratory syndrome coronavirus 2
GGKGFCKLHNWNCVNCDTFCAGST

SEQ ID NO: 92601 - protein, 24 aa, Severe acute respiratory syndrome coronavirus 2
FCKLHNWNCVNCDTFCAGSTFISD

SEQ ID NO: 92602 - protein, 24 aa, Severe acute respiratory syndrome coronavirus 2
CKLHNWNCVNCDTFCAGSTFISDE

SEQ ID NO: 92603 - protein, 24 aa, Severe acute respiratory syndrome coronavirus 2
KLHNWNCVNCDTFCAGSTFISDEV

SEQ ID NO: 92604 - protein, 24 aa, Severe acute respiratory syndrome coronavirus 2
LHNWNCVNCDTFCAGSTFISDEVA

SEQ ID NO: 92605 - protein, 24 aa, Severe acute respiratory syndrome coronavirus 2
HNWNCVNCDTFCAGSTFISDEVAR

SEQ ID NO: 92606 - protein, 24 aa, Severe acute respiratory syndrome coronavirus 2
NWNCVNCDTFCAGSTFISDEVARD

SEQ ID NO: 92607 - protein, 24 aa, Severe acute respiratory syndrome coronavirus 2
WNCVNCDTFCAGSTFISDEVARDL

SEQ ID NO: 92608 - protein, 24 aa, Severe acute respiratory syndrome coronavirus 2
NCVNCDTFCAGSTFISDEVARDLS

SEQ ID NO: 92609 - protein, 24 aa, Severe acute respiratory syndrome coronavirus 2
CVNCDTFCAGSTFISDEVARDLSL

SEQ ID NO: 92610 - protein, 24 aa, Severe acute respiratory syndrome coronavirus 2
VNCDTFCAGSTFISDEVARDLSLQ

SEQ ID NO: 92611 - protein, 24 aa, Severe acute respiratory syndrome coronavirus 2
NCDTFCAGSTFISDEVARDLSLQF

SEQ ID NO: 92612 - protein, 24 aa, Severe acute respiratory syndrome coronavirus 2
CDTFCAGSTFISDEVARDLSLQFK

SEQ ID NO: 92613 - protein, 24 aa, Severe acute respiratory syndrome coronavirus 2
DTFCAGSTFISDEVARDLSLQFKR

SEQ ID NO: 92614 - protein, 24 aa, Severe acute respiratory syndrome coronavirus 2
TFCAGSTFISDEVARDLSLQFKRP

SEQ ID NO: 92615 - protein, 24 aa, Severe acute respiratory syndrome coronavirus 2
FCAGSTFISDEVARDLSLQFKRPI

SEQ ID NO: 92616 - protein, 24 aa, Severe acute respiratory syndrome coronavirus 2
LDNVLSTFISAARQGFVDSDVETK

SEQ ID NO: 92617 - protein, 24 aa, Severe acute respiratory syndrome coronavirus 2
DNVLSTFISAARQGFVDSDVETKD

SEQ ID NO: 92618 - protein, 24 aa, Severe acute respiratory syndrome coronavirus 2
NVLSTFISAARQGFVDSDVETKDV

SEQ ID NO: 92619 - protein, 24 aa, Severe acute respiratory syndrome coronavirus 2
VLSTFISAARQGFVDSDVETKDVV

SEQ ID NO: 92620 - protein, 24 aa, Severe acute respiratory syndrome coronavirus 2
LSTFISAARQGFVDSDVETKDVVE

SEQ ID NO: 92621 - protein, 24 aa, Severe acute respiratory syndrome coronavirus 2
STFISAARQGFVDSDVETKDVVEC

SEQ ID NO: 92622 - protein, 24 aa, Severe acute respiratory syndrome coronavirus 2
TFISAARQGFVDSDVETKDVVECL

SEQ ID NO: 92623 - protein, 24 aa, Severe acute respiratory syndrome coronavirus 2
FISAARQGFVDSDVETKDVVECLK

SEQ ID NO: 92624 - protein, 24 aa, Severe acute respiratory syndrome coronavirus 2
ISAARQGFVDSDVETKDVVECLKL

SEQ ID NO: 92625 - protein, 24 aa, Severe acute respiratory syndrome coronavirus 2
SAARQGFVDSDVETKDVVECLKLS

SEQ ID NO: 92626 - protein, 24 aa, Severe acute respiratory syndrome coronavirus 2
AARQGFVDSDVETKDVVECLKLSH

SEQ ID NO: 92627 - protein, 24 aa, Severe acute respiratory syndrome coronavirus 2
ARQGFVDSDVETKDVVECLKLSHQ

SEQ ID NO: 92628 - protein, 24 aa, Severe acute respiratory syndrome coronavirus 2
RQGFVDSDVETKDVVECLKLSHQS

SEQ ID NO: 92629 - protein, 24 aa, Severe acute respiratory syndrome coronavirus 2
GFVDSDVETKDVVECLKLSHQSDI

SEQ ID NO: 92630 - protein, 24 aa, Severe acute respiratory syndrome coronavirus 2
FVDSDVETKDVVECLKLSHQSDIE

SEQ ID NO: 92631 - protein, 24 aa, Severe acute respiratory syndrome coronavirus 2
VDSDVETKDVVECLKLSHQSDIEV

SEQ ID NO: 92632 - protein, 24 aa, Severe acute respiratory syndrome coronavirus 2
DSDVETKDVVECLKLSHQSDIEVT

SEQ ID NO: 92633 - protein, 24 aa, Severe acute respiratory syndrome coronavirus 2
SDVETKDVVECLKLSHQSDIEVTG

SEQ ID NO: 92634 - protein, 24 aa, Severe acute respiratory syndrome coronavirus 2
DVETKDVVECLKLSHQSDIEVTGD

SEQ ID NO: 92635 - protein, 24 aa, Severe acute respiratory syndrome coronavirus 2
VETKDVVECLKLSHQSDIEVTGDS

SEQ ID NO: 92636 - protein, 24 aa, Severe acute respiratory syndrome coronavirus 2
SLSEQLRKQIRSAAKKNNLPFKLT

SEQ ID NO: 92637 - protein, 24 aa, Severe acute respiratory syndrome coronavirus 2
LSEQLRKQIRSAAKKNNLPFKLTC

SEQ ID NO: 92638 - protein, 24 aa, Severe acute respiratory syndrome coronavirus 2
QIRSAAKKNNLPFKLTCATTRQVV

SEQ ID NO: 92639 - protein, 24 aa, Severe acute respiratory syndrome coronavirus 2
IRSAAKKNNLPFKLTCATTRQVVN

SEQ ID NO: 92640 - protein, 24 aa, Severe acute respiratory syndrome coronavirus 2
RSAAKKNNLPFKLTCATTRQVVNV

SEQ ID NO: 92641 - protein, 24 aa, Severe acute respiratory syndrome coronavirus 2
SAAKKNNLPFKLTCATTRQVVNVV

SEQ ID NO: 92642 - protein, 24 aa, Severe acute respiratory syndrome coronavirus 2
AAKKNNLPFKLTCATTRQVVNVVT

SEQ ID NO: 92643 - protein, 24 aa, Severe acute respiratory syndrome coronavirus 2
AKKNNLPFKLTCATTRQVVNVVTT

SEQ ID NO: 92644 - protein, 24 aa, Severe acute respiratory syndrome coronavirus 2
KKNNLPFKLTCATTRQVVNVVTTK

SEQ ID NO: 92645 - protein, 24 aa, Severe acute respiratory syndrome coronavirus 2
KNNLPFKLTCATTRQVVNVVTTKI

SEQ ID NO: 92646 - protein, 24 aa, Severe acute respiratory syndrome coronavirus 2
NNLPFKLTCATTRQVVNVVTTKIA

SEQ ID NO: 92647 - protein, 24 aa, Severe acute respiratory syndrome coronavirus 2
NLPFKLTCATTRQVVNVVTTKIAL

SEQ ID NO: 92648 - protein, 24 aa, Severe acute respiratory syndrome coronavirus 2
LPFKLTCATTRQVVNVVTTKIALK

SEQ ID NO: 92649 - protein, 24 aa, Severe acute respiratory syndrome coronavirus 2
PFKLTCATTRQVVNVVTTKIALKG

SEQ ID NO: 92650 - protein, 24 aa, Severe acute respiratory syndrome coronavirus 2
FKLTCATTRQVVNVVTTKIALKGG

SEQ ID NO: 92651 - protein, 24 aa, Severe acute respiratory syndrome coronavirus 2
FDTWFSQRGGSYTNDKACPLIAAV

SEQ ID NO: 92652 - protein, 24 aa, Severe acute respiratory syndrome coronavirus 2
DTWFSQRGGSYTNDKACPLIAAVI

SEQ ID NO: 92653 - protein, 24 aa, Severe acute respiratory syndrome coronavirus 2
TWFSQRGGSYTNDKACPLIAAVIT

SEQ ID NO: 92654 - protein, 24 aa, Severe acute respiratory syndrome coronavirus 2
WFSQRGGSYTNDKACPLIAAVITR

SEQ ID NO: 92655 - protein, 24 aa, Severe acute respiratory syndrome coronavirus 2
FSQRGGSYTNDKACPLIAAVITRE

SEQ ID NO: 92656 - protein, 24 aa, Severe acute respiratory syndrome coronavirus 2
TTNGDFLHFLPRVFSAVGNICYTP

SEQ ID NO: 92657 - protein, 24 aa, Severe acute respiratory syndrome coronavirus 2
ATSACVLAAECTIFKDASGKPVPY

SEQ ID NO: 92658 - protein, 24 aa, Severe acute respiratory syndrome coronavirus 2
TSACVLAAECTIFKDASGKPVPYC

SEQ ID NO: 92659 - protein, 24 aa, Severe acute respiratory syndrome coronavirus 2
SACVLAAECTIFKDASGKPVPYCY

SEQ ID NO: 92660 - protein, 24 aa, Severe acute respiratory syndrome coronavirus 2
ACVLAAECTIFKDASGKPVPYCYD

SEQ ID NO: 92661 - protein, 24 aa, Severe acute respiratory syndrome coronavirus 2
CVLAAECTIFKDASGKPVPYCYDT

SEQ ID NO: 92662 - protein, 24 aa, Severe acute respiratory syndrome coronavirus 2
VLAAECTIFKDASGKPVPYCYDTN

SEQ ID NO: 92663 - protein, 24 aa, Severe acute respiratory syndrome coronavirus 2
LAAECTIFKDASGKPVPYCYDTNV

SEQ ID NO: 92664 - protein, 24 aa, Severe acute respiratory syndrome coronavirus 2
AAECTIFKDASGKPVPYCYDTNVL

SEQ ID NO: 92665 - protein, 24 aa, Severe acute respiratory syndrome coronavirus 2
TIFKDASGKPVPYCYDTNVLEGSV

SEQ ID NO: 92666 - protein, 24 aa, Severe acute respiratory syndrome coronavirus 2
IFKDASGKPVPYCYDTNVLEGSVA

SEQ ID NO: 92667 - protein, 24 aa, Severe acute respiratory syndrome coronavirus 2
FKDASGKPVPYCYDTNVLEGSVAY

SEQ ID NO: 92668 - protein, 24 aa, Severe acute respiratory syndrome coronavirus 2
KDASGKPVPYCYDTNVLEGSVAYE

SEQ ID NO: 92669 - protein, 24 aa, Severe acute respiratory syndrome coronavirus 2
DASGKPVPYCYDTNVLEGSVAYES

SEQ ID NO: 92670 - protein, 24 aa, Severe acute respiratory syndrome coronavirus 2
ASGKPVPYCYDTNVLEGSVAYESL

SEQ ID NO: 92671 - protein, 24 aa, Severe acute respiratory syndrome coronavirus 2
SGKPVPYCYDTNVLEGSVAYESLR

SEQ ID NO: 92672 - protein, 24 aa, Severe acute respiratory syndrome coronavirus 2
GKPVPYCYDTNVLEGSVAYESLRP

SEQ ID NO: 92673 - protein, 24 aa, Severe acute respiratory syndrome coronavirus 2
KPVPYCYDTNVLEGSVAYESLRPD

SEQ ID NO: 92674 - protein, 24 aa, Severe acute respiratory syndrome coronavirus 2
PVPYCYDTNVLEGSVAYESLRPDT

SEQ ID NO: 92675 - protein, 24 aa, Severe acute respiratory syndrome coronavirus 2
VPYCYDTNVLEGSVAYESLRPDTR

SEQ ID NO: 92676 - protein, 24 aa, Severe acute respiratory syndrome coronavirus 2
PYCYDTNVLEGSVAYESLRPDTRY

SEQ ID NO: 92677 - protein, 24 aa, Severe acute respiratory syndrome coronavirus 2
YCYDTNVLEGSVAYESLRPDTRYV

SEQ ID NO: 92678 - protein, 24 aa, Severe acute respiratory syndrome coronavirus 2
CYDTNVLEGSVAYESLRPDTRYVL

SEQ ID NO: 92679 - protein, 24 aa, Severe acute respiratory syndrome coronavirus 2
YDTNVLEGSVAYESLRPDTRYVLM

SEQ ID NO: 92680 - protein, 24 aa, Severe acute respiratory syndrome coronavirus 2
DTNVLEGSVAYESLRPDTRYVLMD

SEQ ID NO: 92681 - protein, 24 aa, Severe acute respiratory syndrome coronavirus 2
GVCVSTSGRWVLNNDYYRSLPGVF

SEQ ID NO: 92682 - protein, 24 aa, Severe acute respiratory syndrome coronavirus 2
VCVSTSGRWVLNNDYYRSLPGVFC

SEQ ID NO: 92683 - protein, 24 aa, Severe acute respiratory syndrome coronavirus 2
CVSTSGRWVLNNDYYRSLPGVFCG

SEQ ID NO: 92684 - protein, 24 aa, Severe acute respiratory syndrome coronavirus 2
VSTSGRWVLNNDYYRSLPGVFCGV

SEQ ID NO: 92685 - protein, 24 aa, Severe acute respiratory syndrome coronavirus 2
FLPGVYSVIYLYLTFYLTNDVSFL

SEQ ID NO: 92686 - protein, 24 aa, Severe acute respiratory syndrome coronavirus 2
YIICISTKHFYWFFSNYLKRRVVF

SEQ ID NO: 92687 - protein, 24 aa, Severe acute respiratory syndrome coronavirus 2
IICISTKHFYWFFSNYLKRRVVFN

SEQ ID NO: 92688 - protein, 24 aa, Severe acute respiratory syndrome coronavirus 2
ICISTKHFYWFFSNYLKRRVVFNG

SEQ ID NO: 92689 - protein, 24 aa, Severe acute respiratory syndrome coronavirus 2
CISTKHFYWFFSNYLKRRVVFNGV

SEQ ID NO: 92690 - protein, 24 aa, Severe acute respiratory syndrome coronavirus 2
ISTKHFYWFFSNYLKRRVVFNGVS

SEQ ID NO: 92691 - protein, 24 aa, Severe acute respiratory syndrome coronavirus 2
STKHFYWFFSNYLKRRVVFNGVSF

SEQ ID NO: 92692 - protein, 24 aa, Severe acute respiratory syndrome coronavirus 2
TKHFYWFFSNYLKRRVVFNGVSFS

SEQ ID NO: 92693 - protein, 24 aa, Severe acute respiratory syndrome coronavirus 2
KHFYWFFSNYLKRRVVFNGVSFST

SEQ ID NO: 92694 - protein, 24 aa, Severe acute respiratory syndrome coronavirus 2
HFYWFFSNYLKRRVVFNGVSFSTF

SEQ ID NO: 92695 - protein, 24 aa, Severe acute respiratory syndrome coronavirus 2
FYWFFSNYLKRRVVFNGVSFSTFE

SEQ ID NO: 92696 - protein, 24 aa, Severe acute respiratory syndrome coronavirus 2
YWFFSNYLKRRVVFNGVSFSTFEE

SEQ ID NO: 92697 - protein, 24 aa, Severe acute respiratory syndrome coronavirus 2
WFFSNYLKRRVVFNGVSFSTFEEA

SEQ ID NO: 92698 - protein, 24 aa, Severe acute respiratory syndrome coronavirus 2
FFSNYLKRRVVFNGVSFSTFEEAA

SEQ ID NO: 92699 - protein, 24 aa, Severe acute respiratory syndrome coronavirus 2
FSNYLKRRVVFNGVSFSTFEEAAL

SEQ ID NO: 92700 - protein, 24 aa, Severe acute respiratory syndrome coronavirus 2
SNYLKRRVVFNGVSFSTFEEAALC

SEQ ID NO: 92701 - protein, 24 aa, Severe acute respiratory syndrome coronavirus 2
NYLKRRVVFNGVSFSTFEEAALCT

SEQ ID NO: 92702 - protein, 24 aa, Severe acute respiratory syndrome coronavirus 2
YLKRRVVFNGVSFSTFEEAALCTF

SEQ ID NO: 92703 - protein, 24 aa, Severe acute respiratory syndrome coronavirus 2
LKRRVVFNGVSFSTFEEAALCTFL

SEQ ID NO: 92704 - protein, 24 aa, Severe acute respiratory syndrome coronavirus 2
KRRVVFNGVSFSTFEEAALCTFLL

SEQ ID NO: 92705 - protein, 24 aa, Severe acute respiratory syndrome coronavirus 2
RRVVFNGVSFSTFEEAALCTFLLN

SEQ ID NO: 92706 - protein, 24 aa, Severe acute respiratory syndrome coronavirus 2
RVVFNGVSFSTFEEAALCTFLLNK

SEQ ID NO: 92707 - protein, 24 aa, Severe acute respiratory syndrome coronavirus 2
VVFNGVSFSTFEEAALCTFLLNKE

SEQ ID NO: 92708 - protein, 24 aa, Severe acute respiratory syndrome coronavirus 2
VFNGVSFSTFEEAALCTFLLNKEM

SEQ ID NO: 92709 - protein, 24 aa, Severe acute respiratory syndrome coronavirus 2
FNGVSFSTFEEAALCTFLLNKEMY

SEQ ID NO: 92710 - protein, 24 aa, Severe acute respiratory syndrome coronavirus 2
NGVSFSTFEEAALCTFLLNKEMYL

SEQ ID NO: 92711 - protein, 24 aa, Severe acute respiratory syndrome coronavirus 2
GVSFSTFEEAALCTFLLNKEMYLK

SEQ ID NO: 92712 - protein, 24 aa, Severe acute respiratory syndrome coronavirus 2
VSFSTFEEAALCTFLLNKEMYLKL

SEQ ID NO: 92713 - protein, 24 aa, Severe acute respiratory syndrome coronavirus 2
SFSTFEEAALCTFLLNKEMYLKLR

SEQ ID NO: 92714 - protein, 24 aa, Severe acute respiratory syndrome coronavirus 2
FSTFEEAALCTFLLNKEMYLKLRS

SEQ ID NO: 92715 - protein, 24 aa, Severe acute respiratory syndrome coronavirus 2
STFEEAALCTFLLNKEMYLKLRSD

SEQ ID NO: 92716 - protein, 24 aa, Severe acute respiratory syndrome coronavirus 2
TFEEAALCTFLLNKEMYLKLRSDV

SEQ ID NO: 92717 - protein, 24 aa, Severe acute respiratory syndrome coronavirus 2
FEEAALCTFLLNKEMYLKLRSDVL

SEQ ID NO: 92718 - protein, 24 aa, Severe acute respiratory syndrome coronavirus 2
EEAALCTFLLNKEMYLKLRSDVLL

SEQ ID NO: 92719 - protein, 24 aa, Severe acute respiratory syndrome coronavirus 2
EAALCTFLLNKEMYLKLRSDVLLP

SEQ ID NO: 92720 - protein, 24 aa, Severe acute respiratory syndrome coronavirus 2
CMVQVTCGTTTLNGLWLDDVVYCP

SEQ ID NO: 92721 - protein, 24 aa, Severe acute respiratory syndrome coronavirus 2
MVQVTCGTTTLNGLWLDDVVYCPR

SEQ ID NO: 92722 - protein, 24 aa, Severe acute respiratory syndrome coronavirus 2
VQVTCGTTTLNGLWLDDVVYCPRH

SEQ ID NO: 92723 - protein, 24 aa, Severe acute respiratory syndrome coronavirus 2
QVTCGTTTLNGLWLDDVVYCPRHV

SEQ ID NO: 92724 - protein, 24 aa, Severe acute respiratory syndrome coronavirus 2
VTCGTTTLNGLWLDDVVYCPRHVI

SEQ ID NO: 92725 - protein, 24 aa, Severe acute respiratory syndrome coronavirus 2
TCGTTTLNGLWLDDVVYCPRHVIC

SEQ ID NO: 92726 - protein, 24 aa, Severe acute respiratory syndrome coronavirus 2
SFCYMHHMELPTGVHAGTDLEGNF

SEQ ID NO: 92727 - protein, 24 aa, Severe acute respiratory syndrome coronavirus 2
FCYMHHMELPTGVHAGTDLEGNFY

SEQ ID NO: 92728 - protein, 24 aa, Severe acute respiratory syndrome coronavirus 2
CYMHHMELPTGVHAGTDLEGNFYG

SEQ ID NO: 92729 - protein, 24 aa, Severe acute respiratory syndrome coronavirus 2
TILGSALLEDEFTPFDVVRQCSGV

SEQ ID NO: 92730 - protein, 24 aa, Severe acute respiratory syndrome coronavirus 2
SAVKRTIKGTHHWLLLTILTSLLV

SEQ ID NO: 92731 - protein, 24 aa, Severe acute respiratory syndrome coronavirus 2
AVKRTIKGTHHWLLLTILTSLLVL

SEQ ID NO: 92732 - protein, 24 aa, Severe acute respiratory syndrome coronavirus 2
VKRTIKGTHHWLLLTILTSLLVLV

SEQ ID NO: 92733 - protein, 24 aa, Severe acute respiratory syndrome coronavirus 2
KRTIKGTHHWLLLTILTSLLVLVQ

SEQ ID NO: 92734 - protein, 24 aa, Severe acute respiratory syndrome coronavirus 2
RTIKGTHHWLLLTILTSLLVLVQS

SEQ ID NO: 92735 - protein, 24 aa, Severe acute respiratory syndrome coronavirus 2
TIKGTHHWLLLTILTSLLVLVQST

SEQ ID NO: 92736 - protein, 24 aa, Severe acute respiratory syndrome coronavirus 2
IKGTHHWLLLTILTSLLVLVQSTQ

SEQ ID NO: 92737 - protein, 24 aa, Severe acute respiratory syndrome coronavirus 2
KGTHHWLLLTILTSLLVLVQSTQW

SEQ ID NO: 92738 - protein, 24 aa, Severe acute respiratory syndrome coronavirus 2
GTHHWLLLTILTSLLVLVQSTQWS

SEQ ID NO: 92739 - protein, 24 aa, Severe acute respiratory syndrome coronavirus 2
THHWLLLTILTSLLVLVQSTQWSL

SEQ ID NO: 92740 - protein, 24 aa, Severe acute respiratory syndrome coronavirus 2
HHWLLLTILTSLLVLVQSTQWSLF

SEQ ID NO: 92741 - protein, 24 aa, Severe acute respiratory syndrome coronavirus 2
MGIIAMSAFAMMFVKHKHAFLCLF

SEQ ID NO: 92742 - protein, 24 aa, Severe acute respiratory syndrome coronavirus 2
GIIAMSAFAMMFVKHKHAFLCLFL

SEQ ID NO: 92743 - protein, 24 aa, Severe acute respiratory syndrome coronavirus 2
IIAMSAFAMMFVKHKHAFLCLFLL

SEQ ID NO: 92744 - protein, 24 aa, Severe acute respiratory syndrome coronavirus 2
IAMSAFAMMFVKHKHAFLCLFLLP

SEQ ID NO: 92745 - protein, 24 aa, Severe acute respiratory syndrome coronavirus 2
AMSAFAMMFVKHKHAFLCLFLLPS

SEQ ID NO: 92746 - protein, 24 aa, Severe acute respiratory syndrome coronavirus 2
MVDTSLSGFKLKDCVMYASAVVLL

SEQ ID NO: 92747 - protein, 24 aa, Severe acute respiratory syndrome coronavirus 2
VDTSLSGFKLKDCVMYASAVVLLI

SEQ ID NO: 92748 - protein, 24 aa, Severe acute respiratory syndrome coronavirus 2
DTSLSGFKLKDCVMYASAVVLLIL

SEQ ID NO: 92749 - protein, 24 aa, Severe acute respiratory syndrome coronavirus 2
TSLSGFKLKDCVMYASAVVLLILM

SEQ ID NO: 92750 - protein, 24 aa, Severe acute respiratory syndrome coronavirus 2
SLSGFKLKDCVMYASAVVLLILMT

SEQ ID NO: 92751 - protein, 24 aa, Severe acute respiratory syndrome coronavirus 2
NRYFRLTLGVYDYLVSTQEFRYMN

SEQ ID NO: 92752 - protein, 24 aa, Severe acute respiratory syndrome coronavirus 2
RYFRLTLGVYDYLVSTQEFRYMNS

SEQ ID NO: 92753 - protein, 24 aa, Severe acute respiratory syndrome coronavirus 2
YFRLTLGVYDYLVSTQEFRYMNSQ

SEQ ID NO: 92754 - protein, 24 aa, Severe acute respiratory syndrome coronavirus 2
FRLTLGVYDYLVSTQEFRYMNSQG

SEQ ID NO: 92755 - protein, 24 aa, Severe acute respiratory syndrome coronavirus 2
RLTLGVYDYLVSTQEFRYMNSQGL

SEQ ID NO: 92756 - protein, 24 aa, Severe acute respiratory syndrome coronavirus 2
SKMSDVKCTSVVLLSVLQQLRVES

SEQ ID NO: 92757 - protein, 24 aa, Severe acute respiratory syndrome coronavirus 2
VQLHNDILLAKDTTEAFEKMVSLL

SEQ ID NO: 92758 - protein, 24 aa, Severe acute respiratory syndrome coronavirus 2
QLHNDILLAKDTTEAFEKMVSLLS

SEQ ID NO: 92759 - protein, 24 aa, Severe acute respiratory syndrome coronavirus 2
LLSMQGAVDINKLCEEMLDNRATL

SEQ ID NO: 92760 - protein, 24 aa, Severe acute respiratory syndrome coronavirus 2
LSMQGAVDINKLCEEMLDNRATLQ

SEQ ID NO: 92761 - protein, 24 aa, Severe acute respiratory syndrome coronavirus 2
AMQRKLEKMADQAMTQMYKQARSE

SEQ ID NO: 92762 - protein, 24 aa, Severe acute respiratory syndrome coronavirus 2
MQRKLEKMADQAMTQMYKQARSED

SEQ ID NO: 92763 - protein, 24 aa, Severe acute respiratory syndrome coronavirus 2
QRKLEKMADQAMTQMYKQARSEDK

SEQ ID NO: 92764 - protein, 24 aa, Severe acute respiratory syndrome coronavirus 2
RKLEKMADQAMTQMYKQARSEDKR

SEQ ID NO: 92765 - protein, 24 aa, Severe acute respiratory syndrome coronavirus 2
KLEKMADQAMTQMYKQARSEDKRA

SEQ ID NO: 92766 - protein, 24 aa, Severe acute respiratory syndrome coronavirus 2
LEKMADQAMTQMYKQARSEDKRAK

SEQ ID NO: 92767 - protein, 24 aa, Severe acute respiratory syndrome coronavirus 2
EKMADQAMTQMYKQARSEDKRAKV

SEQ ID NO: 92768 - protein, 24 aa, Severe acute respiratory syndrome coronavirus 2
KMADQAMTQMYKQARSEDKRAKVT

SEQ ID NO: 92769 - protein, 24 aa, Severe acute respiratory syndrome coronavirus 2
MADQAMTQMYKQARSEDKRAKVTS

SEQ ID NO: 92770 - protein, 24 aa, Severe acute respiratory syndrome coronavirus 2
ADQAMTQMYKQARSEDKRAKVTSA

SEQ ID NO: 92771 - protein, 24 aa, Severe acute respiratory syndrome coronavirus 2
DQAMTQMYKQARSEDKRAKVTSAM

SEQ ID NO: 92772 - protein, 24 aa, Severe acute respiratory syndrome coronavirus 2
QAMTQMYKQARSEDKRAKVTSAMQ

SEQ ID NO: 92773 - protein, 24 aa, Severe acute respiratory syndrome coronavirus 2
AMTQMYKQARSEDKRAKVTSAMQT

SEQ ID NO: 92774 - protein, 24 aa, Severe acute respiratory syndrome coronavirus 2
MTQMYKQARSEDKRAKVTSAMQTM

SEQ ID NO: 92775 - protein, 24 aa, Severe acute respiratory syndrome coronavirus 2
TQMYKQARSEDKRAKVTSAMQTML

SEQ ID NO: 92776 - protein, 24 aa, Severe acute respiratory syndrome coronavirus 2
QMYKQARSEDKRAKVTSAMQTMLF

SEQ ID NO: 92777 - protein, 24 aa, Severe acute respiratory syndrome coronavirus 2
MYKQARSEDKRAKVTSAMQTMLFT

SEQ ID NO: 92778 - protein, 24 aa, Severe acute respiratory syndrome coronavirus 2
YKQARSEDKRAKVTSAMQTMLFTM

SEQ ID NO: 92779 - protein, 24 aa, Severe acute respiratory syndrome coronavirus 2
KQARSEDKRAKVTSAMQTMLFTML

SEQ ID NO: 92780 - protein, 24 aa, Severe acute respiratory syndrome coronavirus 2
QARSEDKRAKVTSAMQTMLFTMLR

SEQ ID NO: 92781 - protein, 24 aa, Severe acute respiratory syndrome coronavirus 2
ARSEDKRAKVTSAMQTMLFTMLRK

SEQ ID NO: 92782 - protein, 24 aa, Severe acute respiratory syndrome coronavirus 2
RSEDKRAKVTSAMQTMLFTMLRKL

SEQ ID NO: 92783 - protein, 24 aa, Severe acute respiratory syndrome coronavirus 2
SEDKRAKVTSAMQTMLFTMLRKLD

SEQ ID NO: 92784 - protein, 24 aa, Severe acute respiratory syndrome coronavirus 2
EDKRAKVTSAMQTMLFTMLRKLDN

SEQ ID NO: 92785 - protein, 24 aa, Severe acute respiratory syndrome coronavirus 2
RKLDNDALNNIINNARDGCVPLNI

SEQ ID NO: 92786 - protein, 24 aa, Severe acute respiratory syndrome coronavirus 2
KLDNDALNNIINNARDGCVPLNII

SEQ ID NO: 92787 - protein, 24 aa, Severe acute respiratory syndrome coronavirus 2
LDNDALNNIINNARDGCVPLNIIP

SEQ ID NO: 92788 - protein, 24 aa, Severe acute respiratory syndrome coronavirus 2
DNDALNNIINNARDGCVPLNIIPL

SEQ ID NO: 92789 - protein, 24 aa, Severe acute respiratory syndrome coronavirus 2
VDADSKIVQLSEISMDNSPNLAWP

SEQ ID NO: 92790 - protein, 24 aa, Severe acute respiratory syndrome coronavirus 2
DADSKIVQLSEISMDNSPNLAWPL

SEQ ID NO: 92791 - protein, 24 aa, Severe acute respiratory syndrome coronavirus 2
ADSKIVQLSEISMDNSPNLAWPLI

SEQ ID NO: 92792 - protein, 24 aa, Severe acute respiratory syndrome coronavirus 2
DSKIVQLSEISMDNSPNLAWPLIV

SEQ ID NO: 92793 - protein, 24 aa, Severe acute respiratory syndrome coronavirus 2
PCRFVTDTPKGPKVKYLYFIKGLN

SEQ ID NO: 92794 - protein, 24 aa, Severe acute respiratory syndrome coronavirus 2
CRFVTDTPKGPKVKYLYFIKGLNN

SEQ ID NO: 92795 - protein, 24 aa, Severe acute respiratory syndrome coronavirus 2
RFVTDTPKGPKVKYLYFIKGLNNL

SEQ ID NO: 92796 - protein, 24 aa, Severe acute respiratory syndrome coronavirus 2
FVTDTPKGPKVKYLYFIKGLNNLN

SEQ ID NO: 92797 - protein, 24 aa, Severe acute respiratory syndrome coronavirus 2
VTDTPKGPKVKYLYFIKGLNNLNR

SEQ ID NO: 92798 - protein, 24 aa, Severe acute respiratory syndrome coronavirus 2
TDTPKGPKVKYLYFIKGLNNLNRG

SEQ ID NO: 92799 - protein, 24 aa, Severe acute respiratory syndrome coronavirus 2
DTPKGPKVKYLYFIKGLNNLNRGM

SEQ ID NO: 92800 - protein, 24 aa, Severe acute respiratory syndrome coronavirus 2
TPKGPKVKYLYFIKGLNNLNRGMV

SEQ ID NO: 92801 - protein, 24 aa, Severe acute respiratory syndrome coronavirus 2
PKGPKVKYLYFIKGLNNLNRGMVL

SEQ ID NO: 92802 - protein, 24 aa, Severe acute respiratory syndrome coronavirus 2
VLSFCAFAVDAAKAYKDYLASGGQ

SEQ ID NO: 92803 - protein, 24 aa, Severe acute respiratory syndrome coronavirus 2
VDAAKAYKDYLASGGQPITNCVKM

SEQ ID NO: 92804 - protein, 24 aa, Severe acute respiratory syndrome coronavirus 2
DAAKAYKDYLASGGQPITNCVKML

SEQ ID NO: 92805 - protein, 24 aa, Severe acute respiratory syndrome coronavirus 2
AAKAYKDYLASGGQPITNCVKMLC

SEQ ID NO: 92806 - protein, 24 aa, Severe acute respiratory syndrome coronavirus 2
AKAYKDYLASGGQPITNCVKMLCT

SEQ ID NO: 92807 - protein, 24 aa, Severe acute respiratory syndrome coronavirus 2
KAYKDYLASGGQPITNCVKMLCTH

SEQ ID NO: 92808 - protein, 25 aa, Severe acute respiratory syndrome coronavirus 2
VYCCREHEHEIAWYTERSEKSYELQ

SEQ ID NO: 92809 - protein, 25 aa, Severe acute respiratory syndrome coronavirus 2
YCCREHEHEIAWYTERSEKSYELQT

SEQ ID NO: 92810 - protein, 25 aa, Severe acute respiratory syndrome coronavirus 2
CCREHEHEIAWYTERSEKSYELQTP

SEQ ID NO: 92811 - protein, 25 aa, Severe acute respiratory syndrome coronavirus 2
CREHEHEIAWYTERSEKSYELQTPF

SEQ ID NO: 92812 - protein, 25 aa, Severe acute respiratory syndrome coronavirus 2
REHEHEIAWYTERSEKSYELQTPFE

SEQ ID NO: 92813 - protein, 25 aa, Severe acute respiratory syndrome coronavirus 2
EHEHEIAWYTERSEKSYELQTPFEI

SEQ ID NO: 92814 - protein, 25 aa, Severe acute respiratory syndrome coronavirus 2
HEHEIAWYTERSEKSYELQTPFEIK

SEQ ID NO: 92815 - protein, 25 aa, Severe acute respiratory syndrome coronavirus 2
EHEIAWYTERSEKSYELQTPFEIKL

SEQ ID NO: 92816 - protein, 25 aa, Severe acute respiratory syndrome coronavirus 2
HEIAWYTERSEKSYELQTPFEIKLA

SEQ ID NO: 92817 - protein, 25 aa, Severe acute respiratory syndrome coronavirus 2
EIAWYTERSEKSYELQTPFEIKLAK

SEQ ID NO: 92818 - protein, 25 aa, Severe acute respiratory syndrome coronavirus 2
IAWYTERSEKSYELQTPFEIKLAKK

SEQ ID NO: 92819 - protein, 25 aa, Severe acute respiratory syndrome coronavirus 2
AWYTERSEKSYELQTPFEIKLAKKF

SEQ ID NO: 92820 - protein, 25 aa, Severe acute respiratory syndrome coronavirus 2
WYTERSEKSYELQTPFEIKLAKKFD

SEQ ID NO: 92821 - protein, 25 aa, Severe acute respiratory syndrome coronavirus 2
NKFLALCADSIIIGGAKLKALNLGE

SEQ ID NO: 92822 - protein, 25 aa, Severe acute respiratory syndrome coronavirus 2
YITTYPGQGLNGYTVEEAKTVLKKC

SEQ ID NO: 92823 - protein, 25 aa, Severe acute respiratory syndrome coronavirus 2
ITTYPGQGLNGYTVEEAKTVLKKCK

SEQ ID NO: 92824 - protein, 25 aa, Severe acute respiratory syndrome coronavirus 2
TTYPGQGLNGYTVEEAKTVLKKCKS

SEQ ID NO: 92825 - protein, 25 aa, Severe acute respiratory syndrome coronavirus 2
TAYNGYLTSSSKTPEEHFIETISLA

SEQ ID NO: 92826 - protein, 25 aa, Severe acute respiratory syndrome coronavirus 2
AYNGYLTSSSKTPEEHFIETISLAG

SEQ ID NO: 92827 - protein, 25 aa, Severe acute respiratory syndrome coronavirus 2
YNGYLTSSSKTPEEHFIETISLAGS

SEQ ID NO: 92828 - protein, 25 aa, Severe acute respiratory syndrome coronavirus 2
NGYLTSSSKTPEEHFIETISLAGSY

SEQ ID NO: 92829 - protein, 25 aa, Severe acute respiratory syndrome coronavirus 2
GYLTSSSKTPEEHFIETISLAGSYK

SEQ ID NO: 92830 - protein, 25 aa, Severe acute respiratory syndrome coronavirus 2
YLTSSSKTPEEHFIETISLAGSYKD

SEQ ID NO: 92831 - protein, 25 aa, Severe acute respiratory syndrome coronavirus 2
LTSSSKTPEEHFIETISLAGSYKDW

SEQ ID NO: 92832 - protein, 25 aa, Severe acute respiratory syndrome coronavirus 2
KKWKYPQVNGLTSIKWADNNCYLAT

SEQ ID NO: 92833 - protein, 25 aa, Severe acute respiratory syndrome coronavirus 2
ELKFNPPALQDAYYRARAGEAANFC

SEQ ID NO: 92834 - protein, 25 aa, Severe acute respiratory syndrome coronavirus 2
LKFNPPALQDAYYRARAGEAANFCA

SEQ ID NO: 92835 - protein, 25 aa, Severe acute respiratory syndrome coronavirus 2
KFNPPALQDAYYRARAGEAANFCAL

SEQ ID NO: 92836 - protein, 25 aa, Severe acute respiratory syndrome coronavirus 2
LFQHANLDSCKRVLNVVCKTCGQQQ

SEQ ID NO: 92837 - protein, 25 aa, Severe acute respiratory syndrome coronavirus 2
FQHANLDSCKRVLNVVCKTCGQQQT

SEQ ID NO: 92838 - protein, 25 aa, Severe acute respiratory syndrome coronavirus 2
DVFYKENSYTTTIKPVTYKLDGVVC

SEQ ID NO: 92839 - protein, 25 aa, Severe acute respiratory syndrome coronavirus 2
KENSYTTTIKPVTYKLDGVVCTEID

SEQ ID NO: 92840 - protein, 25 aa, Severe acute respiratory syndrome coronavirus 2
ENSYTTTIKPVTYKLDGVVCTEIDP

SEQ ID NO: 92841 - protein, 25 aa, Severe acute respiratory syndrome coronavirus 2
NSYTTTIKPVTYKLDGVVCTEIDPK

SEQ ID NO: 92842 - protein, 25 aa, Severe acute respiratory syndrome coronavirus 2
SYTTTIKPVTYKLDGVVCTEIDPKL

SEQ ID NO: 92843 - protein, 25 aa, Severe acute respiratory syndrome coronavirus 2
YTTTIKPVTYKLDGVVCTEIDPKLD

SEQ ID NO: 92844 - protein, 25 aa, Severe acute respiratory syndrome coronavirus 2
TTTIKPVTYKLDGVVCTEIDPKLDN

SEQ ID NO: 92845 - protein, 25 aa, Severe acute respiratory syndrome coronavirus 2
TTIKPVTYKLDGVVCTEIDPKLDNY

SEQ ID NO: 92846 - protein, 25 aa, Severe acute respiratory syndrome coronavirus 2
TIKPVTYKLDGVVCTEIDPKLDNYY

SEQ ID NO: 92847 - protein, 25 aa, Severe acute respiratory syndrome coronavirus 2
IKPVTYKLDGVVCTEIDPKLDNYYK

SEQ ID NO: 92848 - protein, 25 aa, Severe acute respiratory syndrome coronavirus 2
KPVTYKLDGVVCTEIDPKLDNYYKK

SEQ ID NO: 92849 - protein, 25 aa, Severe acute respiratory syndrome coronavirus 2
GVVCTEIDPKLDNYYKKDNSYFTEQ

SEQ ID NO: 92850 - protein, 25 aa, Severe acute respiratory syndrome coronavirus 2
VVCTEIDPKLDNYYKKDNSYFTEQP

SEQ ID NO: 92851 - protein, 25 aa, Severe acute respiratory syndrome coronavirus 2
VCTEIDPKLDNYYKKDNSYFTEQPI

SEQ ID NO: 92852 - protein, 25 aa, Severe acute respiratory syndrome coronavirus 2
CTEIDPKLDNYYKKDNSYFTEQPID

SEQ ID NO: 92853 - protein, 25 aa, Severe acute respiratory syndrome coronavirus 2
TEIDPKLDNYYKKDNSYFTEQPIDL

SEQ ID NO: 92854 - protein, 25 aa, Severe acute respiratory syndrome coronavirus 2
EIDPKLDNYYKKDNSYFTEQPIDLV

SEQ ID NO: 92855 - protein, 25 aa, Severe acute respiratory syndrome coronavirus 2
IDPKLDNYYKKDNSYFTEQPIDLVP

SEQ ID NO: 92856 - protein, 25 aa, Severe acute respiratory syndrome coronavirus 2
DPKLDNYYKKDNSYFTEQPIDLVPN

SEQ ID NO: 92857 - protein, 25 aa, Severe acute respiratory syndrome coronavirus 2
PKLDNYYKKDNSYFTEQPIDLVPNQ

SEQ ID NO: 92858 - protein, 25 aa, Severe acute respiratory syndrome coronavirus 2
KLDNYYKKDNSYFTEQPIDLVPNQP

SEQ ID NO: 92859 - protein, 25 aa, Severe acute respiratory syndrome coronavirus 2
LDNYYKKDNSYFTEQPIDLVPNQPY

SEQ ID NO: 92860 - protein, 25 aa, Severe acute respiratory syndrome coronavirus 2
ASFDNFKFVCDNIKFADDLNQLTGY

SEQ ID NO: 92861 - protein, 25 aa, Severe acute respiratory syndrome coronavirus 2
SFDNFKFVCDNIKFADDLNQLTGYK

SEQ ID NO: 92862 - protein, 25 aa, Severe acute respiratory syndrome coronavirus 2
FDNFKFVCDNIKFADDLNQLTGYKK

SEQ ID NO: 92863 - protein, 25 aa, Severe acute respiratory syndrome coronavirus 2
DNFKFVCDNIKFADDLNQLTGYKKP

SEQ ID NO: 92864 - protein, 25 aa, Severe acute respiratory syndrome coronavirus 2
NFKFVCDNIKFADDLNQLTGYKKPA

SEQ ID NO: 92865 - protein, 25 aa, Severe acute respiratory syndrome coronavirus 2
DLNQLTGYKKPASRELKVTFFPDLN

SEQ ID NO: 92866 - protein, 25 aa, Severe acute respiratory syndrome coronavirus 2
LNQLTGYKKPASRELKVTFFPDLNG

SEQ ID NO: 92867 - protein, 25 aa, Severe acute respiratory syndrome coronavirus 2
NQLTGYKKPASRELKVTFFPDLNGD

SEQ ID NO: 92868 - protein, 25 aa, Severe acute respiratory syndrome coronavirus 2
QLTGYKKPASRELKVTFFPDLNGDV

SEQ ID NO: 92869 - protein, 25 aa, Severe acute respiratory syndrome coronavirus 2
LTGYKKPASRELKVTFFPDLNGDVV

SEQ ID NO: 92870 - protein, 25 aa, Severe acute respiratory syndrome coronavirus 2
TGYKKPASRELKVTFFPDLNGDVVA

SEQ ID NO: 92871 - protein, 25 aa, Severe acute respiratory syndrome coronavirus 2
GYKKPASRELKVTFFPDLNGDVVAI

SEQ ID NO: 92872 - protein, 25 aa, Severe acute respiratory syndrome coronavirus 2
YKKPASRELKVTFFPDLNGDVVAID

SEQ ID NO: 92873 - protein, 25 aa, Severe acute respiratory syndrome coronavirus 2
KKPASRELKVTFFPDLNGDVVAIDY

SEQ ID NO: 92874 - protein, 25 aa, Severe acute respiratory syndrome coronavirus 2
KPASRELKVTFFPDLNGDVVAIDYK

SEQ ID NO: 92875 - protein, 25 aa, Severe acute respiratory syndrome coronavirus 2
PASRELKVTFFPDLNGDVVAIDYKH

SEQ ID NO: 92876 - protein, 25 aa, Severe acute respiratory syndrome coronavirus 2
ASRELKVTFFPDLNGDVVAIDYKHY

SEQ ID NO: 92877 - protein, 25 aa, Severe acute respiratory syndrome coronavirus 2
RELKVTFFPDLNGDVVAIDYKHYTP

SEQ ID NO: 92878 - protein, 25 aa, Severe acute respiratory syndrome coronavirus 2
ELKVTFFPDLNGDVVAIDYKHYTPS

SEQ ID NO: 92879 - protein, 25 aa, Severe acute respiratory syndrome coronavirus 2
QITISSFKWDLTAFGLVAEWFLAYI

SEQ ID NO: 92880 - protein, 25 aa, Severe acute respiratory syndrome coronavirus 2
ITISSFKWDLTAFGLVAEWFLAYIL

SEQ ID NO: 92881 - protein, 25 aa, Severe acute respiratory syndrome coronavirus 2
TISSFKWDLTAFGLVAEWFLAYILF

SEQ ID NO: 92882 - protein, 25 aa, Severe acute respiratory syndrome coronavirus 2
ISSFKWDLTAFGLVAEWFLAYILFT

SEQ ID NO: 92883 - protein, 25 aa, Severe acute respiratory syndrome coronavirus 2
SSFKWDLTAFGLVAEWFLAYILFTR

SEQ ID NO: 92884 - protein, 25 aa, Severe acute respiratory syndrome coronavirus 2
SFKWDLTAFGLVAEWFLAYILFTRF

SEQ ID NO: 92885 - protein, 25 aa, Severe acute respiratory syndrome coronavirus 2
FKWDLTAFGLVAEWFLAYILFTRFF

SEQ ID NO: 92886 - protein, 25 aa, Severe acute respiratory syndrome coronavirus 2
KWDLTAFGLVAEWFLAYILFTRFFY

SEQ ID NO: 92887 - protein, 25 aa, Severe acute respiratory syndrome coronavirus 2
FGLVAEWFLAYILFTRFFYVLGLAA

SEQ ID NO: 92888 - protein, 25 aa, Severe acute respiratory syndrome coronavirus 2
GLVAEWFLAYILFTRFFYVLGLAAI

SEQ ID NO: 92889 - protein, 25 aa, Severe acute respiratory syndrome coronavirus 2
LVAEWFLAYILFTRFFYVLGLAAIM

SEQ ID NO: 92890 - protein, 25 aa, Severe acute respiratory syndrome coronavirus 2
VAEWFLAYILFTRFFYVLGLAAIMQ

SEQ ID NO: 92891 - protein, 25 aa, Severe acute respiratory syndrome coronavirus 2
FFSYFAVHFISNSWLMWLIINLVQM

SEQ ID NO: 92892 - protein, 25 aa, Severe acute respiratory syndrome coronavirus 2
FSYFAVHFISNSWLMWLIINLVQMA

SEQ ID NO: 92893 - protein, 25 aa, Severe acute respiratory syndrome coronavirus 2
SSTCMMCYKRNRATRVECTTIVNGV

SEQ ID NO: 92894 - protein, 25 aa, Severe acute respiratory syndrome coronavirus 2
SFYVYANGGKGFCKLHNWNCVNCDT

SEQ ID NO: 92895 - protein, 25 aa, Severe acute respiratory syndrome coronavirus 2
FYVYANGGKGFCKLHNWNCVNCDTF

SEQ ID NO: 92896 - protein, 25 aa, Severe acute respiratory syndrome coronavirus 2
YVYANGGKGFCKLHNWNCVNCDTFC

SEQ ID NO: 92897 - protein, 25 aa, Severe acute respiratory syndrome coronavirus 2
VYANGGKGFCKLHNWNCVNCDTFCA

SEQ ID NO: 92898 - protein, 25 aa, Severe acute respiratory syndrome coronavirus 2
YANGGKGFCKLHNWNCVNCDTFCAG

SEQ ID NO: 92899 - protein, 25 aa, Severe acute respiratory syndrome coronavirus 2
ANGGKGFCKLHNWNCVNCDTFCAGS

SEQ ID NO: 92900 - protein, 25 aa, Severe acute respiratory syndrome coronavirus 2
NGGKGFCKLHNWNCVNCDTFCAGST

SEQ ID NO: 92901 - protein, 25 aa, Severe acute respiratory syndrome coronavirus 2
GGKGFCKLHNWNCVNCDTFCAGSTF

SEQ ID NO: 92902 - protein, 25 aa, Severe acute respiratory syndrome coronavirus 2
GFCKLHNWNCVNCDTFCAGSTFISD

SEQ ID NO: 92903 - protein, 25 aa, Severe acute respiratory syndrome coronavirus 2
FCKLHNWNCVNCDTFCAGSTFISDE

SEQ ID NO: 92904 - protein, 25 aa, Severe acute respiratory syndrome coronavirus 2
CKLHNWNCVNCDTFCAGSTFISDEV

SEQ ID NO: 92905 - protein, 25 aa, Severe acute respiratory syndrome coronavirus 2
KLHNWNCVNCDTFCAGSTFISDEVA

SEQ ID NO: 92906 - protein, 25 aa, Severe acute respiratory syndrome coronavirus 2
LHNWNCVNCDTFCAGSTFISDEVAR

SEQ ID NO: 92907 - protein, 25 aa, Severe acute respiratory syndrome coronavirus 2
HNWNCVNCDTFCAGSTFISDEVARD

SEQ ID NO: 92908 - protein, 25 aa, Severe acute respiratory syndrome coronavirus 2
NWNCVNCDTFCAGSTFISDEVARDL

SEQ ID NO: 92909 - protein, 25 aa, Severe acute respiratory syndrome coronavirus 2
WNCVNCDTFCAGSTFISDEVARDLS

SEQ ID NO: 92910 - protein, 25 aa, Severe acute respiratory syndrome coronavirus 2
NCVNCDTFCAGSTFISDEVARDLSL

SEQ ID NO: 92911 - protein, 25 aa, Severe acute respiratory syndrome coronavirus 2
CVNCDTFCAGSTFISDEVARDLSLQ

SEQ ID NO: 92912 - protein, 25 aa, Severe acute respiratory syndrome coronavirus 2
VNCDTFCAGSTFISDEVARDLSLQF

SEQ ID NO: 92913 - protein, 25 aa, Severe acute respiratory syndrome coronavirus 2
NCDTFCAGSTFISDEVARDLSLQFK

SEQ ID NO: 92914 - protein, 25 aa, Severe acute respiratory syndrome coronavirus 2
CDTFCAGSTFISDEVARDLSLQFKR

SEQ ID NO: 92915 - protein, 25 aa, Severe acute respiratory syndrome coronavirus 2
DTFCAGSTFISDEVARDLSLQFKRP

SEQ ID NO: 92916 - protein, 25 aa, Severe acute respiratory syndrome coronavirus 2
TFCAGSTFISDEVARDLSLQFKRPI

SEQ ID NO: 92917 - protein, 25 aa, Severe acute respiratory syndrome coronavirus 2
LDNVLSTFISAARQGFVDSDVETKD

SEQ ID NO: 92918 - protein, 25 aa, Severe acute respiratory syndrome coronavirus 2
DNVLSTFISAARQGFVDSDVETKDV

SEQ ID NO: 92919 - protein, 25 aa, Severe acute respiratory syndrome coronavirus 2
NVLSTFISAARQGFVDSDVETKDVV

SEQ ID NO: 92920 - protein, 25 aa, Severe acute respiratory syndrome coronavirus 2
LSTFISAARQGFVDSDVETKDVVEC

SEQ ID NO: 92921 - protein, 25 aa, Severe acute respiratory syndrome coronavirus 2
STFISAARQGFVDSDVETKDVVECL

SEQ ID NO: 92922 - protein, 25 aa, Severe acute respiratory syndrome coronavirus 2
TFISAARQGFVDSDVETKDVVECLK

SEQ ID NO: 92923 - protein, 25 aa, Severe acute respiratory syndrome coronavirus 2
FISAARQGFVDSDVETKDVVECLKL

SEQ ID NO: 92924 - protein, 25 aa, Severe acute respiratory syndrome coronavirus 2
ISAARQGFVDSDVETKDVVECLKLS

SEQ ID NO: 92925 - protein, 25 aa, Severe acute respiratory syndrome coronavirus 2
SAARQGFVDSDVETKDVVECLKLSH

SEQ ID NO: 92926 - protein, 25 aa, Severe acute respiratory syndrome coronavirus 2
AARQGFVDSDVETKDVVECLKLSHQ

SEQ ID NO: 92927 - protein, 25 aa, Severe acute respiratory syndrome coronavirus 2
RQGFVDSDVETKDVVECLKLSHQSD

SEQ ID NO: 92928 - protein, 25 aa, Severe acute respiratory syndrome coronavirus 2
QGFVDSDVETKDVVECLKLSHQSDI

SEQ ID NO: 92929 - protein, 25 aa, Severe acute respiratory syndrome coronavirus 2
GFVDSDVETKDVVECLKLSHQSDIE

SEQ ID NO: 92930 - protein, 25 aa, Severe acute respiratory syndrome coronavirus 2
FVDSDVETKDVVECLKLSHQSDIEV

SEQ ID NO: 92931 - protein, 25 aa, Severe acute respiratory syndrome coronavirus 2
VDSDVETKDVVECLKLSHQSDIEVT

SEQ ID NO: 92932 - protein, 25 aa, Severe acute respiratory syndrome coronavirus 2
DSDVETKDVVECLKLSHQSDIEVTG

SEQ ID NO: 92933 - protein, 25 aa, Severe acute respiratory syndrome coronavirus 2
SDVETKDVVECLKLSHQSDIEVTGD

SEQ ID NO: 92934 - protein, 25 aa, Severe acute respiratory syndrome coronavirus 2
DVETKDVVECLKLSHQSDIEVTGDS

SEQ ID NO: 92935 - protein, 25 aa, Severe acute respiratory syndrome coronavirus 2
SLSEQLRKQIRSAAKKNNLPFKLTC

SEQ ID NO: 92936 - protein, 25 aa, Severe acute respiratory syndrome coronavirus 2
QIRSAAKKNNLPFKLTCATTRQVVN

SEQ ID NO: 92937 - protein, 25 aa, Severe acute respiratory syndrome coronavirus 2
IRSAAKKNNLPFKLTCATTRQVVNV

SEQ ID NO: 92938 - protein, 25 aa, Severe acute respiratory syndrome coronavirus 2
RSAAKKNNLPFKLTCATTRQVVNVV

SEQ ID NO: 92939 - protein, 25 aa, Severe acute respiratory syndrome coronavirus 2
SAAKKNNLPFKLTCATTRQVVNVVT

SEQ ID NO: 92940 - protein, 25 aa, Severe acute respiratory syndrome coronavirus 2
AAKKNNLPFKLTCATTRQVVNVVTT

SEQ ID NO: 92941 - protein, 25 aa, Severe acute respiratory syndrome coronavirus 2
AKKNNLPFKLTCATTRQVVNVVTTK

SEQ ID NO: 92942 - protein, 25 aa, Severe acute respiratory syndrome coronavirus 2
KKNNLPFKLTCATTRQVVNVVTTKI

SEQ ID NO: 92943 - protein, 25 aa, Severe acute respiratory syndrome coronavirus 2
KNNLPFKLTCATTRQVVNVVTTKIA

SEQ ID NO: 92944 - protein, 25 aa, Severe acute respiratory syndrome coronavirus 2
NNLPFKLTCATTRQVVNVVTTKIAL

SEQ ID NO: 92945 - protein, 25 aa, Severe acute respiratory syndrome coronavirus 2
NLPFKLTCATTRQVVNVVTTKIALK

SEQ ID NO: 92946 - protein, 25 aa, Severe acute respiratory syndrome coronavirus 2
LPFKLTCATTRQVVNVVTTKIALKG

SEQ ID NO: 92947 - protein, 25 aa, Severe acute respiratory syndrome coronavirus 2
PFKLTCATTRQVVNVVTTKIALKGG

SEQ ID NO: 92948 - protein, 25 aa, Severe acute respiratory syndrome coronavirus 2
FDTWFSQRGGSYTNDKACPLIAAVI

SEQ ID NO: 92949 - protein, 25 aa, Severe acute respiratory syndrome coronavirus 2
DTWFSQRGGSYTNDKACPLIAAVIT

SEQ ID NO: 92950 - protein, 25 aa, Severe acute respiratory syndrome coronavirus 2
TWFSQRGGSYTNDKACPLIAAVITR

SEQ ID NO: 92951 - protein, 25 aa, Severe acute respiratory syndrome coronavirus 2
WFSQRGGSYTNDKACPLIAAVITRE

SEQ ID NO: 92952 - protein, 25 aa, Severe acute respiratory syndrome coronavirus 2
ATSACVLAAECTIFKDASGKPVPYC

SEQ ID NO: 92953 - protein, 25 aa, Severe acute respiratory syndrome coronavirus 2
TSACVLAAECTIFKDASGKPVPYCY

SEQ ID NO: 92954 - protein, 25 aa, Severe acute respiratory syndrome coronavirus 2
SACVLAAECTIFKDASGKPVPYCYD

SEQ ID NO: 92955 - protein, 25 aa, Severe acute respiratory syndrome coronavirus 2
ACVLAAECTIFKDASGKPVPYCYDT

SEQ ID NO: 92956 - protein, 25 aa, Severe acute respiratory syndrome coronavirus 2
CVLAAECTIFKDASGKPVPYCYDTN

SEQ ID NO: 92957 - protein, 25 aa, Severe acute respiratory syndrome coronavirus 2
VLAAECTIFKDASGKPVPYCYDTNV

SEQ ID NO: 92958 - protein, 25 aa, Severe acute respiratory syndrome coronavirus 2
LAAECTIFKDASGKPVPYCYDTNVL

SEQ ID NO: 92959 - protein, 25 aa, Severe acute respiratory syndrome coronavirus 2
AAECTIFKDASGKPVPYCYDTNVLE

SEQ ID NO: 92960 - protein, 25 aa, Severe acute respiratory syndrome coronavirus 2
AECTIFKDASGKPVPYCYDTNVLEG

SEQ ID NO: 92961 - protein, 25 aa, Severe acute respiratory syndrome coronavirus 2
CTIFKDASGKPVPYCYDTNVLEGSV

SEQ ID NO: 92962 - protein, 25 aa, Severe acute respiratory syndrome coronavirus 2
TIFKDASGKPVPYCYDTNVLEGSVA

SEQ ID NO: 92963 - protein, 25 aa, Severe acute respiratory syndrome coronavirus 2
IFKDASGKPVPYCYDTNVLEGSVAY

SEQ ID NO: 92964 - protein, 25 aa, Severe acute respiratory syndrome coronavirus 2
FKDASGKPVPYCYDTNVLEGSVAYE

SEQ ID NO: 92965 - protein, 25 aa, Severe acute respiratory syndrome coronavirus 2
KDASGKPVPYCYDTNVLEGSVAYES

SEQ ID NO: 92966 - protein, 25 aa, Severe acute respiratory syndrome coronavirus 2
DASGKPVPYCYDTNVLEGSVAYESL

SEQ ID NO: 92967 - protein, 25 aa, Severe acute respiratory syndrome coronavirus 2
ASGKPVPYCYDTNVLEGSVAYESLR

SEQ ID NO: 92968 - protein, 25 aa, Severe acute respiratory syndrome coronavirus 2
SGKPVPYCYDTNVLEGSVAYESLRP

SEQ ID NO: 92969 - protein, 25 aa, Severe acute respiratory syndrome coronavirus 2
GKPVPYCYDTNVLEGSVAYESLRPD

SEQ ID NO: 92970 - protein, 25 aa, Severe acute respiratory syndrome coronavirus 2
KPVPYCYDTNVLEGSVAYESLRPDT

SEQ ID NO: 92971 - protein, 25 aa, Severe acute respiratory syndrome coronavirus 2
PVPYCYDTNVLEGSVAYESLRPDTR

SEQ ID NO: 92972 - protein, 25 aa, Severe acute respiratory syndrome coronavirus 2
VPYCYDTNVLEGSVAYESLRPDTRY

SEQ ID NO: 92973 - protein, 25 aa, Severe acute respiratory syndrome coronavirus 2
PYCYDTNVLEGSVAYESLRPDTRYV

SEQ ID NO: 92974 - protein, 25 aa, Severe acute respiratory syndrome coronavirus 2
YCYDTNVLEGSVAYESLRPDTRYVL

SEQ ID NO: 92975 - protein, 25 aa, Severe acute respiratory syndrome coronavirus 2
CYDTNVLEGSVAYESLRPDTRYVLM

SEQ ID NO: 92976 - protein, 25 aa, Severe acute respiratory syndrome coronavirus 2
YDTNVLEGSVAYESLRPDTRYVLMD

SEQ ID NO: 92977 - protein, 25 aa, Severe acute respiratory syndrome coronavirus 2
GVCVSTSGRWVLNNDYYRSLPGVFC

SEQ ID NO: 92978 - protein, 25 aa, Severe acute respiratory syndrome coronavirus 2
VCVSTSGRWVLNNDYYRSLPGVFCG

SEQ ID NO: 92979 - protein, 25 aa, Severe acute respiratory syndrome coronavirus 2
CVSTSGRWVLNNDYYRSLPGVFCGV

SEQ ID NO: 92980 - protein, 25 aa, Severe acute respiratory syndrome coronavirus 2
YIICISTKHFYWFFSNYLKRRVVFN

SEQ ID NO: 92981 - protein, 25 aa, Severe acute respiratory syndrome coronavirus 2
IICISTKHFYWFFSNYLKRRVVFNG

SEQ ID NO: 92982 - protein, 25 aa, Severe acute respiratory syndrome coronavirus 2
ICISTKHFYWFFSNYLKRRVVFNGV

SEQ ID NO: 92983 - protein, 25 aa, Severe acute respiratory syndrome coronavirus 2
CISTKHFYWFFSNYLKRRVVFNGVS

SEQ ID NO: 92984 - protein, 25 aa, Severe acute respiratory syndrome coronavirus 2
ISTKHFYWFFSNYLKRRVVFNGVSF

SEQ ID NO: 92985 - protein, 25 aa, Severe acute respiratory syndrome coronavirus 2
STKHFYWFFSNYLKRRVVFNGVSFS

SEQ ID NO: 92986 - protein, 25 aa, Severe acute respiratory syndrome coronavirus 2
TKHFYWFFSNYLKRRVVFNGVSFST

SEQ ID NO: 92987 - protein, 25 aa, Severe acute respiratory syndrome coronavirus 2
KHFYWFFSNYLKRRVVFNGVSFSTF

SEQ ID NO: 92988 - protein, 25 aa, Severe acute respiratory syndrome coronavirus 2
HFYWFFSNYLKRRVVFNGVSFSTFE

SEQ ID NO: 92989 - protein, 25 aa, Severe acute respiratory syndrome coronavirus 2
FYWFFSNYLKRRVVFNGVSFSTFEE

SEQ ID NO: 92990 - protein, 25 aa, Severe acute respiratory syndrome coronavirus 2
YWFFSNYLKRRVVFNGVSFSTFEEA

SEQ ID NO: 92991 - protein, 25 aa, Severe acute respiratory syndrome coronavirus 2
WFFSNYLKRRVVFNGVSFSTFEEAA

SEQ ID NO: 92992 - protein, 25 aa, Severe acute respiratory syndrome coronavirus 2
FFSNYLKRRVVFNGVSFSTFEEAAL

SEQ ID NO: 92993 - protein, 25 aa, Severe acute respiratory syndrome coronavirus 2
FSNYLKRRVVFNGVSFSTFEEAALC

SEQ ID NO: 92994 - protein, 25 aa, Severe acute respiratory syndrome coronavirus 2
SNYLKRRVVFNGVSFSTFEEAALCT

SEQ ID NO: 92995 - protein, 25 aa, Severe acute respiratory syndrome coronavirus 2
NYLKRRVVFNGVSFSTFEEAALCTF

SEQ ID NO: 92996 - protein, 25 aa, Severe acute respiratory syndrome coronavirus 2
YLKRRVVFNGVSFSTFEEAALCTFL

SEQ ID NO: 92997 - protein, 25 aa, Severe acute respiratory syndrome coronavirus 2
LKRRVVFNGVSFSTFEEAALCTFLL

SEQ ID NO: 92998 - protein, 25 aa, Severe acute respiratory syndrome coronavirus 2
KRRVVFNGVSFSTFEEAALCTFLLN

SEQ ID NO: 92999 - protein, 25 aa, Severe acute respiratory syndrome coronavirus 2
RRVVFNGVSFSTFEEAALCTFLLNK

SEQ ID NO: 93000 - protein, 25 aa, Severe acute respiratory syndrome coronavirus 2
RVVFNGVSFSTFEEAALCTFLLNKE

SEQ ID NO: 93001 - protein, 25 aa, Severe acute respiratory syndrome coronavirus 2
VVFNGVSFSTFEEAALCTFLLNKEM

SEQ ID NO: 93002 - protein, 25 aa, Severe acute respiratory syndrome coronavirus 2
VFNGVSFSTFEEAALCTFLLNKEMY

SEQ ID NO: 93003 - protein, 25 aa, Severe acute respiratory syndrome coronavirus 2
FNGVSFSTFEEAALCTFLLNKEMYL

SEQ ID NO: 93004 - protein, 25 aa, Severe acute respiratory syndrome coronavirus 2
NGVSFSTFEEAALCTFLLNKEMYLK

SEQ ID NO: 93005 - protein, 25 aa, Severe acute respiratory syndrome coronavirus 2
GVSFSTFEEAALCTFLLNKEMYLKL

SEQ ID NO: 93006 - protein, 25 aa, Severe acute respiratory syndrome coronavirus 2
VSFSTFEEAALCTFLLNKEMYLKLR

SEQ ID NO: 93007 - protein, 25 aa, Severe acute respiratory syndrome coronavirus 2
SFSTFEEAALCTFLLNKEMYLKLRS

SEQ ID NO: 93008 - protein, 25 aa, Severe acute respiratory syndrome coronavirus 2
FSTFEEAALCTFLLNKEMYLKLRSD

SEQ ID NO: 93009 - protein, 25 aa, Severe acute respiratory syndrome coronavirus 2
STFEEAALCTFLLNKEMYLKLRSDV

SEQ ID NO: 93010 - protein, 25 aa, Severe acute respiratory syndrome coronavirus 2
TFEEAALCTFLLNKEMYLKLRSDVL

SEQ ID NO: 93011 - protein, 25 aa, Severe acute respiratory syndrome coronavirus 2
FEEAALCTFLLNKEMYLKLRSDVLL

SEQ ID NO: 93012 - protein, 25 aa, Severe acute respiratory syndrome coronavirus 2
EEAALCTFLLNKEMYLKLRSDVLLP

SEQ ID NO: 93013 - protein, 25 aa, Severe acute respiratory syndrome coronavirus 2
CMVQVTCGTTTLNGLWLDDVVYCPR

SEQ ID NO: 93014 - protein, 25 aa, Severe acute respiratory syndrome coronavirus 2
MVQVTCGTTTLNGLWLDDVVYCPRH

SEQ ID NO: 93015 - protein, 25 aa, Severe acute respiratory syndrome coronavirus 2
VQVTCGTTTLNGLWLDDVVYCPRHV

SEQ ID NO: 93016 - protein, 25 aa, Severe acute respiratory syndrome coronavirus 2
QVTCGTTTLNGLWLDDVVYCPRHVI

SEQ ID NO: 93017 - protein, 25 aa, Severe acute respiratory syndrome coronavirus 2
VTCGTTTLNGLWLDDVVYCPRHVIC

SEQ ID NO: 93018 - protein, 25 aa, Severe acute respiratory syndrome coronavirus 2
SFCYMHHMELPTGVHAGTDLEGNFY

SEQ ID NO: 93019 - protein, 25 aa, Severe acute respiratory syndrome coronavirus 2
FCYMHHMELPTGVHAGTDLEGNFYG

SEQ ID NO: 93020 - protein, 25 aa, Severe acute respiratory syndrome coronavirus 2
SAVKRTIKGTHHWLLLTILTSLLVL

SEQ ID NO: 93021 - protein, 25 aa, Severe acute respiratory syndrome coronavirus 2
AVKRTIKGTHHWLLLTILTSLLVLV

SEQ ID NO: 93022 - protein, 25 aa, Severe acute respiratory syndrome coronavirus 2
VKRTIKGTHHWLLLTILTSLLVLVQ

SEQ ID NO: 93023 - protein, 25 aa, Severe acute respiratory syndrome coronavirus 2
KRTIKGTHHWLLLTILTSLLVLVQS

SEQ ID NO: 93024 - protein, 25 aa, Severe acute respiratory syndrome coronavirus 2
RTIKGTHHWLLLTILTSLLVLVQST

SEQ ID NO: 93025 - protein, 25 aa, Severe acute respiratory syndrome coronavirus 2
TIKGTHHWLLLTILTSLLVLVQSTQ

SEQ ID NO: 93026 - protein, 25 aa, Severe acute respiratory syndrome coronavirus 2
IKGTHHWLLLTILTSLLVLVQSTQW

SEQ ID NO: 93027 - protein, 25 aa, Severe acute respiratory syndrome coronavirus 2
KGTHHWLLLTILTSLLVLVQSTQWS

SEQ ID NO: 93028 - protein, 25 aa, Severe acute respiratory syndrome coronavirus 2
GTHHWLLLTILTSLLVLVQSTQWSL

SEQ ID NO: 93029 - protein, 25 aa, Severe acute respiratory syndrome coronavirus 2
THHWLLLTILTSLLVLVQSTQWSLF

SEQ ID NO: 93030 - protein, 25 aa, Severe acute respiratory syndrome coronavirus 2
MGIIAMSAFAMMFVKHKHAFLCLFL

SEQ ID NO: 93031 - protein, 25 aa, Severe acute respiratory syndrome coronavirus 2
GIIAMSAFAMMFVKHKHAFLCLFLL

SEQ ID NO: 93032 - protein, 25 aa, Severe acute respiratory syndrome coronavirus 2
IIAMSAFAMMFVKHKHAFLCLFLLP

SEQ ID NO: 93033 - protein, 25 aa, Severe acute respiratory syndrome coronavirus 2
IAMSAFAMMFVKHKHAFLCLFLLPS

SEQ ID NO: 93034 - protein, 25 aa, Severe acute respiratory syndrome coronavirus 2
MVDTSLSGFKLKDCVMYASAVVLLI

SEQ ID NO: 93035 - protein, 25 aa, Severe acute respiratory syndrome coronavirus 2
VDTSLSGFKLKDCVMYASAVVLLIL

SEQ ID NO: 93036 - protein, 25 aa, Severe acute respiratory syndrome coronavirus 2
DTSLSGFKLKDCVMYASAVVLLILM

SEQ ID NO: 93037 - protein, 25 aa, Severe acute respiratory syndrome coronavirus 2
TSLSGFKLKDCVMYASAVVLLILMT

SEQ ID NO: 93038 - protein, 25 aa, Severe acute respiratory syndrome coronavirus 2
NRYFRLTLGVYDYLVSTQEFRYMNS

SEQ ID NO: 93039 - protein, 25 aa, Severe acute respiratory syndrome coronavirus 2
RYFRLTLGVYDYLVSTQEFRYMNSQ

SEQ ID NO: 93040 - protein, 25 aa, Severe acute respiratory syndrome coronavirus 2
YFRLTLGVYDYLVSTQEFRYMNSQG

SEQ ID NO: 93041 - protein, 25 aa, Severe acute respiratory syndrome coronavirus 2
FRLTLGVYDYLVSTQEFRYMNSQGL

SEQ ID NO: 93042 - protein, 25 aa, Severe acute respiratory syndrome coronavirus 2
VQLHNDILLAKDTTEAFEKMVSLLS

SEQ ID NO: 93043 - protein, 25 aa, Severe acute respiratory syndrome coronavirus 2
LLSMQGAVDINKLCEEMLDNRATLQ

SEQ ID NO: 93044 - protein, 25 aa, Severe acute respiratory syndrome coronavirus 2
AMQRKLEKMADQAMTQMYKQARSED

SEQ ID NO: 93045 - protein, 25 aa, Severe acute respiratory syndrome coronavirus 2
MQRKLEKMADQAMTQMYKQARSEDK

SEQ ID NO: 93046 - protein, 25 aa, Severe acute respiratory syndrome coronavirus 2
QRKLEKMADQAMTQMYKQARSEDKR

SEQ ID NO: 93047 - protein, 25 aa, Severe acute respiratory syndrome coronavirus 2
RKLEKMADQAMTQMYKQARSEDKRA

SEQ ID NO: 93048 - protein, 25 aa, Severe acute respiratory syndrome coronavirus 2
KLEKMADQAMTQMYKQARSEDKRAK

SEQ ID NO: 93049 - protein, 25 aa, Severe acute respiratory syndrome coronavirus 2
LEKMADQAMTQMYKQARSEDKRAKV

SEQ ID NO: 93050 - protein, 25 aa, Severe acute respiratory syndrome coronavirus 2
EKMADQAMTQMYKQARSEDKRAKVT

SEQ ID NO: 93051 - protein, 25 aa, Severe acute respiratory syndrome coronavirus 2
KMADQAMTQMYKQARSEDKRAKVTS

SEQ ID NO: 93052 - protein, 25 aa, Severe acute respiratory syndrome coronavirus 2
MADQAMTQMYKQARSEDKRAKVTSA

SEQ ID NO: 93053 - protein, 25 aa, Severe acute respiratory syndrome coronavirus 2
ADQAMTQMYKQARSEDKRAKVTSAM

SEQ ID NO: 93054 - protein, 25 aa, Severe acute respiratory syndrome coronavirus 2
DQAMTQMYKQARSEDKRAKVTSAMQ

SEQ ID NO: 93055 - protein, 25 aa, Severe acute respiratory syndrome coronavirus 2
QAMTQMYKQARSEDKRAKVTSAMQT

SEQ ID NO: 93056 - protein, 25 aa, Severe acute respiratory syndrome coronavirus 2
AMTQMYKQARSEDKRAKVTSAMQTM

SEQ ID NO: 93057 - protein, 25 aa, Severe acute respiratory syndrome coronavirus 2
MTQMYKQARSEDKRAKVTSAMQTML

SEQ ID NO: 93058 - protein, 25 aa, Severe acute respiratory syndrome coronavirus 2
TQMYKQARSEDKRAKVTSAMQTMLF

SEQ ID NO: 93059 - protein, 25 aa, Severe acute respiratory syndrome coronavirus 2
QMYKQARSEDKRAKVTSAMQTMLFT

SEQ ID NO: 93060 - protein, 25 aa, Severe acute respiratory syndrome coronavirus 2
MYKQARSEDKRAKVTSAMQTMLFTM

SEQ ID NO: 93061 - protein, 25 aa, Severe acute respiratory syndrome coronavirus 2
YKQARSEDKRAKVTSAMQTMLFTML

SEQ ID NO: 93062 - protein, 25 aa, Severe acute respiratory syndrome coronavirus 2
KQARSEDKRAKVTSAMQTMLFTMLR

SEQ ID NO: 93063 - protein, 25 aa, Severe acute respiratory syndrome coronavirus 2
QARSEDKRAKVTSAMQTMLFTMLRK

SEQ ID NO: 93064 - protein, 25 aa, Severe acute respiratory syndrome coronavirus 2
ARSEDKRAKVTSAMQTMLFTMLRKL

SEQ ID NO: 93065 - protein, 25 aa, Severe acute respiratory syndrome coronavirus 2
RSEDKRAKVTSAMQTMLFTMLRKLD

SEQ ID NO: 93066 - protein, 25 aa, Severe acute respiratory syndrome coronavirus 2
SEDKRAKVTSAMQTMLFTMLRKLDN

SEQ ID NO: 93067 - protein, 25 aa, Severe acute respiratory syndrome coronavirus 2
RKLDNDALNNIINNARDGCVPLNII

SEQ ID NO: 93068 - protein, 25 aa, Severe acute respiratory syndrome coronavirus 2
KLDNDALNNIINNARDGCVPLNIIP

SEQ ID NO: 93069 - protein, 25 aa, Severe acute respiratory syndrome coronavirus 2
LDNDALNNIINNARDGCVPLNIIPL

SEQ ID NO: 93070 - protein, 25 aa, Severe acute respiratory syndrome coronavirus 2
VDADSKIVQLSEISMDNSPNLAWPL

SEQ ID NO: 93071 - protein, 25 aa, Severe acute respiratory syndrome coronavirus 2
DADSKIVQLSEISMDNSPNLAWPLI

SEQ ID NO: 93072 - protein, 25 aa, Severe acute respiratory syndrome coronavirus 2
ADSKIVQLSEISMDNSPNLAWPLIV

SEQ ID NO: 93073 - protein, 25 aa, Severe acute respiratory syndrome coronavirus 2
PCRFVTDTPKGPKVKYLYFIKGLNN

SEQ ID NO: 93074 - protein, 25 aa, Severe acute respiratory syndrome coronavirus 2
CRFVTDTPKGPKVKYLYFIKGLNNL

SEQ ID NO: 93075 - protein, 25 aa, Severe acute respiratory syndrome coronavirus 2
RFVTDTPKGPKVKYLYFIKGLNNLN

SEQ ID NO: 93076 - protein, 25 aa, Severe acute respiratory syndrome coronavirus 2
FVTDTPKGPKVKYLYFIKGLNNLNR

SEQ ID NO: 93077 - protein, 25 aa, Severe acute respiratory syndrome coronavirus 2
VTDTPKGPKVKYLYFIKGLNNLNRG

SEQ ID NO: 93078 - protein, 25 aa, Severe acute respiratory syndrome coronavirus 2
TDTPKGPKVKYLYFIKGLNNLNRGM

SEQ ID NO: 93079 - protein, 25 aa, Severe acute respiratory syndrome coronavirus 2
DTPKGPKVKYLYFIKGLNNLNRGMV

SEQ ID NO: 93080 - protein, 25 aa, Severe acute respiratory syndrome coronavirus 2
TPKGPKVKYLYFIKGLNNLNRGMVL

SEQ ID NO: 93081 - protein, 25 aa, Severe acute respiratory syndrome coronavirus 2
VDAAKAYKDYLASGGQPITNCVKML

SEQ ID NO: 93082 - protein, 25 aa, Severe acute respiratory syndrome coronavirus 2
DAAKAYKDYLASGGQPITNCVKMLC

SEQ ID NO: 93083 - protein, 25 aa, Severe acute respiratory syndrome coronavirus 2
AAKAYKDYLASGGQPITNCVKMLCT

SEQ ID NO: 93084 - protein, 25 aa, Severe acute respiratory syndrome coronavirus 2
AKAYKDYLASGGQPITNCVKMLCTH

SEQ ID NO: 93085 - protein, 13 aa, Severe acute respiratory syndrome coronavirus 2
FAKFLKTNCCRFQ

SEQ ID NO: 93086 - protein, 13 aa, Severe acute respiratory syndrome coronavirus 2
DDNLIDSYFVVKR

SEQ ID NO: 93087 - protein, 13 aa, Severe acute respiratory syndrome coronavirus 2
DNLIDSYFVVKRH

SEQ ID NO: 93088 - protein, 13 aa, Severe acute respiratory syndrome coronavirus 2
NLIDSYFVVKRHT

SEQ ID NO: 93089 - protein, 13 aa, Severe acute respiratory syndrome coronavirus 2
IDSYFVVKRHTFS

SEQ ID NO: 93090 - protein, 13 aa, Severe acute respiratory syndrome coronavirus 2
DSYFVVKRHTFSN

SEQ ID NO: 93091 - protein, 13 aa, Severe acute respiratory syndrome coronavirus 2
SYFVVKRHTFSNY

SEQ ID NO: 93092 - protein, 13 aa, Severe acute respiratory syndrome coronavirus 2
YFVVKRHTFSNYQ

SEQ ID NO: 93093 - protein, 13 aa, Severe acute respiratory syndrome coronavirus 2
DFFKFRIDGDMVP

SEQ ID NO: 93094 - protein, 13 aa, Severe acute respiratory syndrome coronavirus 2
FFKFRIDGDMVPH

SEQ ID NO: 93095 - protein, 13 aa, Severe acute respiratory syndrome coronavirus 2
FKFRIDGDMVPHI

SEQ ID NO: 93096 - protein, 13 aa, Severe acute respiratory syndrome coronavirus 2
KFRIDGDMVPHIS

SEQ ID NO: 93097 - protein, 13 aa, Severe acute respiratory syndrome coronavirus 2
GDMVPHISRQRLT

SEQ ID NO: 93098 - protein, 13 aa, Severe acute respiratory syndrome coronavirus 2
DMVPHISRQRLTK

SEQ ID NO: 93099 - protein, 13 aa, Severe acute respiratory syndrome coronavirus 2
RQRLTKYTMADLV

SEQ ID NO: 93100 - protein, 13 aa, Severe acute respiratory syndrome coronavirus 2
QRLTKYTMADLVY

SEQ ID NO: 93101 - protein, 13 aa, Severe acute respiratory syndrome coronavirus 2
RLTKYTMADLVYA

SEQ ID NO: 93102 - protein, 13 aa, Severe acute respiratory syndrome coronavirus 2
LTKYTMADLVYAL

SEQ ID NO: 93103 - protein, 13 aa, Severe acute respiratory syndrome coronavirus 2
TKYTMADLVYALR

SEQ ID NO: 93104 - protein, 13 aa, Severe acute respiratory syndrome coronavirus 2
KYTMADLVYALRH

SEQ ID NO: 93105 - protein, 13 aa, Severe acute respiratory syndrome coronavirus 2
YTMADLVYALRHF

SEQ ID NO: 93106 - protein, 13 aa, Severe acute respiratory syndrome coronavirus 2
LLKTVQFCDAMRN

SEQ ID NO: 93107 - protein, 13 aa, Severe acute respiratory syndrome coronavirus 2
FCDAMRNAGIVGV

SEQ ID NO: 93108 - protein, 13 aa, Severe acute respiratory syndrome coronavirus 2
CDAMRNAGIVGVL

SEQ ID NO: 93109 - protein, 13 aa, Severe acute respiratory syndrome coronavirus 2
DAMRNAGIVGVLT

SEQ ID NO: 93110 - protein, 13 aa, Severe acute respiratory syndrome coronavirus 2
AMRNAGIVGVLTL

SEQ ID NO: 93111 - protein, 13 aa, Severe acute respiratory syndrome coronavirus 2
MRNAGIVGVLTLD

SEQ ID NO: 93112 - protein, 13 aa, Severe acute respiratory syndrome coronavirus 2
GIVGVLTLDNQDL

SEQ ID NO: 93113 - protein, 13 aa, Severe acute respiratory syndrome coronavirus 2
IVGVLTLDNQDLN

SEQ ID NO: 93114 - protein, 13 aa, Severe acute respiratory syndrome coronavirus 2
GVPVVDSYYSLLM

SEQ ID NO: 93115 - protein, 13 aa, Severe acute respiratory syndrome coronavirus 2
VPVVDSYYSLLMP

SEQ ID NO: 93116 - protein, 13 aa, Severe acute respiratory syndrome coronavirus 2
PVVDSYYSLLMPI

SEQ ID NO: 93117 - protein, 13 aa, Severe acute respiratory syndrome coronavirus 2
VVDSYYSLLMPIL

SEQ ID NO: 93118 - protein, 13 aa, Severe acute respiratory syndrome coronavirus 2
VDSYYSLLMPILT

SEQ ID NO: 93119 - protein, 13 aa, Severe acute respiratory syndrome coronavirus 2
DSYYSLLMPILTL

SEQ ID NO: 93120 - protein, 13 aa, Severe acute respiratory syndrome coronavirus 2
SYYSLLMPILTLT

SEQ ID NO: 93121 - protein, 13 aa, Severe acute respiratory syndrome coronavirus 2
YYSLLMPILTLTR

SEQ ID NO: 93122 - protein, 13 aa, Severe acute respiratory syndrome coronavirus 2
LTKPYIKWDLLKY

SEQ ID NO: 93123 - protein, 13 aa, Severe acute respiratory syndrome coronavirus 2
TKPYIKWDLLKYD

SEQ ID NO: 93124 - protein, 13 aa, Severe acute respiratory syndrome coronavirus 2
KPYIKWDLLKYDF

SEQ ID NO: 93125 - protein, 13 aa, Severe acute respiratory syndrome coronavirus 2
PYIKWDLLKYDFT

SEQ ID NO: 93126 - protein, 13 aa, Severe acute respiratory syndrome coronavirus 2
YIKWDLLKYDFTE

SEQ ID NO: 93127 - protein, 13 aa, Severe acute respiratory syndrome coronavirus 2
DRCILHCANFNVL

SEQ ID NO: 93128 - protein, 13 aa, Severe acute respiratory syndrome coronavirus 2
RCILHCANFNVLF

SEQ ID NO: 93129 - protein, 13 aa, Severe acute respiratory syndrome coronavirus 2
CILHCANFNVLFS

SEQ ID NO: 93130 - protein, 13 aa, Severe acute respiratory syndrome coronavirus 2
ILHCANFNVLFST

SEQ ID NO: 93131 - protein, 13 aa, Severe acute respiratory syndrome coronavirus 2
LHCANFNVLFSTV

SEQ ID NO: 93132 - protein, 13 aa, Severe acute respiratory syndrome coronavirus 2
HCANFNVLFSTVF

SEQ ID NO: 93133 - protein, 13 aa, Severe acute respiratory syndrome coronavirus 2
CANFNVLFSTVFP

SEQ ID NO: 93134 - protein, 13 aa, Severe acute respiratory syndrome coronavirus 2
VRKIFVDGVPFVV

SEQ ID NO: 93135 - protein, 13 aa, Severe acute respiratory syndrome coronavirus 2
RKIFVDGVPFVVS

SEQ ID NO: 93136 - protein, 13 aa, Severe acute respiratory syndrome coronavirus 2
KIFVDGVPFVVST

SEQ ID NO: 93137 - protein, 13 aa, Severe acute respiratory syndrome coronavirus 2
IFVDGVPFVVSTG

SEQ ID NO: 93138 - protein, 13 aa, Severe acute respiratory syndrome coronavirus 2
DGVPFVVSTGYHF

SEQ ID NO: 93139 - protein, 13 aa, Severe acute respiratory syndrome coronavirus 2
GVPFVVSTGYHFR

SEQ ID NO: 93140 - protein, 13 aa, Severe acute respiratory syndrome coronavirus 2
VPFVVSTGYHFRE

SEQ ID NO: 93141 - protein, 13 aa, Severe acute respiratory syndrome coronavirus 2
PFVVSTGYHFREL

SEQ ID NO: 93142 - protein, 13 aa, Severe acute respiratory syndrome coronavirus 2
FVVSTGYHFRELG

SEQ ID NO: 93143 - protein, 13 aa, Severe acute respiratory syndrome coronavirus 2
TGYHFRELGVVHN

SEQ ID NO: 93144 - protein, 13 aa, Severe acute respiratory syndrome coronavirus 2
LHSSRLSFKELLV

SEQ ID NO: 93145 - protein, 13 aa, Severe acute respiratory syndrome coronavirus 2
HSSRLSFKELLVY

SEQ ID NO: 93146 - protein, 13 aa, Severe acute respiratory syndrome coronavirus 2
SSRLSFKELLVYA

SEQ ID NO: 93147 - protein, 13 aa, Severe acute respiratory syndrome coronavirus 2
SRLSFKELLVYAA

SEQ ID NO: 93148 - protein, 13 aa, Severe acute respiratory syndrome coronavirus 2
RLSFKELLVYAAD

SEQ ID NO: 93149 - protein, 13 aa, Severe acute respiratory syndrome coronavirus 2
LSFKELLVYAADP

SEQ ID NO: 93150 - protein, 13 aa, Severe acute respiratory syndrome coronavirus 2
SFKELLVYAADPA

SEQ ID NO: 93151 - protein, 13 aa, Severe acute respiratory syndrome coronavirus 2
NLLLDKRTTCFSV

SEQ ID NO: 93152 - protein, 13 aa, Severe acute respiratory syndrome coronavirus 2
PGNFNKDFYDFAV

SEQ ID NO: 93153 - protein, 13 aa, Severe acute respiratory syndrome coronavirus 2
GNFNKDFYDFAVS

SEQ ID NO: 93154 - protein, 13 aa, Severe acute respiratory syndrome coronavirus 2
YDYYRYNLPTMCD

SEQ ID NO: 93155 - protein, 13 aa, Severe acute respiratory syndrome coronavirus 2
DYYRYNLPTMCDI

SEQ ID NO: 93156 - protein, 13 aa, Severe acute respiratory syndrome coronavirus 2
YYRYNLPTMCDIR

SEQ ID NO: 93157 - protein, 13 aa, Severe acute respiratory syndrome coronavirus 2
QVIVNNLDKSAGF

SEQ ID NO: 93158 - protein, 13 aa, Severe acute respiratory syndrome coronavirus 2
TITQMNLKYAISA

SEQ ID NO: 93159 - protein, 13 aa, Severe acute respiratory syndrome coronavirus 2
ITQMNLKYAISAK

SEQ ID NO: 93160 - protein, 13 aa, Severe acute respiratory syndrome coronavirus 2
TQMNLKYAISAKN

SEQ ID NO: 93161 - protein, 13 aa, Severe acute respiratory syndrome coronavirus 2
QMNLKYAISAKNR

SEQ ID NO: 93162 - protein, 13 aa, Severe acute respiratory syndrome coronavirus 2
MNLKYAISAKNRA

SEQ ID NO: 93163 - protein, 13 aa, Severe acute respiratory syndrome coronavirus 2
NLKYAISAKNRAR

SEQ ID NO: 93164 - protein, 13 aa, Severe acute respiratory syndrome coronavirus 2
LKYAISAKNRART

SEQ ID NO: 93165 - protein, 13 aa, Severe acute respiratory syndrome coronavirus 2
KYAISAKNRARTV

SEQ ID NO: 93166 - protein, 13 aa, Severe acute respiratory syndrome coronavirus 2
YAISAKNRARTVA

SEQ ID NO: 93167 - protein, 13 aa, Severe acute respiratory syndrome coronavirus 2
AISAKNRARTVAG

SEQ ID NO: 93168 - protein, 13 aa, Severe acute respiratory syndrome coronavirus 2
NRARTVAGVSICS

SEQ ID NO: 93169 - protein, 13 aa, Severe acute respiratory syndrome coronavirus 2
RARTVAGVSICST

SEQ ID NO: 93170 - protein, 13 aa, Severe acute respiratory syndrome coronavirus 2
ARTVAGVSICSTM

SEQ ID NO: 93171 - protein, 13 aa, Severe acute respiratory syndrome coronavirus 2
RTVAGVSICSTMT

SEQ ID NO: 93172 - protein, 13 aa, Severe acute respiratory syndrome coronavirus 2
TVAGVSICSTMTN

SEQ ID NO: 93173 - protein, 13 aa, Severe acute respiratory syndrome coronavirus 2
TNRQFHQKLLKSI

SEQ ID NO: 93174 - protein, 13 aa, Severe acute respiratory syndrome coronavirus 2
NRQFHQKLLKSIA

SEQ ID NO: 93175 - protein, 13 aa, Severe acute respiratory syndrome coronavirus 2
RQFHQKLLKSIAA

SEQ ID NO: 93176 - protein, 13 aa, Severe acute respiratory syndrome coronavirus 2
QFHQKLLKSIAAT

SEQ ID NO: 93177 - protein, 13 aa, Severe acute respiratory syndrome coronavirus 2
FHQKLLKSIAATR

SEQ ID NO: 93178 - protein, 13 aa, Severe acute respiratory syndrome coronavirus 2
HQKLLKSIAATRG

SEQ ID NO: 93179 - protein, 13 aa, Severe acute respiratory syndrome coronavirus 2
QKLLKSIAATRGA

SEQ ID NO: 93180 - protein, 13 aa, Severe acute respiratory syndrome coronavirus 2
KLLKSIAATRGAT

SEQ ID NO: 93181 - protein, 13 aa, Severe acute respiratory syndrome coronavirus 2
PGGTSSGDATTAY

SEQ ID NO: 93182 - protein, 13 aa, Severe acute respiratory syndrome coronavirus 2
GGTSSGDATTAYA

SEQ ID NO: 93183 - protein, 13 aa, Severe acute respiratory syndrome coronavirus 2
GTSSGDATTAYAN

SEQ ID NO: 93184 - protein, 13 aa, Severe acute respiratory syndrome coronavirus 2
TSSGDATTAYANS

SEQ ID NO: 93185 - protein, 13 aa, Severe acute respiratory syndrome coronavirus 2
SSGDATTAYANSV

SEQ ID NO: 93186 - protein, 13 aa, Severe acute respiratory syndrome coronavirus 2
SGDATTAYANSVF

SEQ ID NO: 93187 - protein, 13 aa, Severe acute respiratory syndrome coronavirus 2
GDATTAYANSVFN

SEQ ID NO: 93188 - protein, 13 aa, Severe acute respiratory syndrome coronavirus 2
DATTAYANSVFNI

SEQ ID NO: 93189 - protein, 13 aa, Severe acute respiratory syndrome coronavirus 2
ATTAYANSVFNIC

SEQ ID NO: 93190 - protein, 13 aa, Severe acute respiratory syndrome coronavirus 2
TTAYANSVFNICQ

SEQ ID NO: 93191 - protein, 13 aa, Severe acute respiratory syndrome coronavirus 2
TAYANSVFNICQA

SEQ ID NO: 93192 - protein, 13 aa, Severe acute respiratory syndrome coronavirus 2
AYANSVFNICQAV

SEQ ID NO: 93193 - protein, 13 aa, Severe acute respiratory syndrome coronavirus 2
YANSVFNICQAVT

SEQ ID NO: 93194 - protein, 13 aa, Severe acute respiratory syndrome coronavirus 2
ANSVFNICQAVTA

SEQ ID NO: 93195 - protein, 13 aa, Severe acute respiratory syndrome coronavirus 2
NSVFNICQAVTAN

SEQ ID NO: 93196 - protein, 13 aa, Severe acute respiratory syndrome coronavirus 2
SVFNICQAVTANV

SEQ ID NO: 93197 - protein, 13 aa, Severe acute respiratory syndrome coronavirus 2
VFNICQAVTANVN

SEQ ID NO: 93198 - protein, 13 aa, Severe acute respiratory syndrome coronavirus 2
FNICQAVTANVNA

SEQ ID NO: 93199 - protein, 13 aa, Severe acute respiratory syndrome coronavirus 2
NICQAVTANVNAL

SEQ ID NO: 93200 - protein, 13 aa, Severe acute respiratory syndrome coronavirus 2
ICQAVTANVNALL

SEQ ID NO: 93201 - protein, 13 aa, Severe acute respiratory syndrome coronavirus 2
CQAVTANVNALLS

SEQ ID NO: 93202 - protein, 13 aa, Severe acute respiratory syndrome coronavirus 2
QAVTANVNALLST

SEQ ID NO: 93203 - protein, 13 aa, Severe acute respiratory syndrome coronavirus 2
AVTANVNALLSTD

SEQ ID NO: 93204 - protein, 13 aa, Severe acute respiratory syndrome coronavirus 2
NVNALLSTDGNKI

SEQ ID NO: 93205 - protein, 13 aa, Severe acute respiratory syndrome coronavirus 2
VNALLSTDGNKIA

SEQ ID NO: 93206 - protein, 13 aa, Severe acute respiratory syndrome coronavirus 2
NALLSTDGNKIAD

SEQ ID NO: 93207 - protein, 13 aa, Severe acute respiratory syndrome coronavirus 2
ALLSTDGNKIADK

SEQ ID NO: 93208 - protein, 13 aa, Severe acute respiratory syndrome coronavirus 2
ADKYVRNLQHRLY

SEQ ID NO: 93209 - protein, 13 aa, Severe acute respiratory syndrome coronavirus 2
YVRNLQHRLYECL

SEQ ID NO: 93210 - protein, 13 aa, Severe acute respiratory syndrome coronavirus 2
VRNLQHRLYECLY

SEQ ID NO: 93211 - protein, 13 aa, Severe acute respiratory syndrome coronavirus 2
RNLQHRLYECLYR

SEQ ID NO: 93212 - protein, 13 aa, Severe acute respiratory syndrome coronavirus 2
VDTDFVNEFYAYL

SEQ ID NO: 93213 - protein, 13 aa, Severe acute respiratory syndrome coronavirus 2
FYAYLRKHFSMMI

SEQ ID NO: 93214 - protein, 13 aa, Severe acute respiratory syndrome coronavirus 2
YAYLRKHFSMMIL

SEQ ID NO: 93215 - protein, 13 aa, Severe acute respiratory syndrome coronavirus 2
AYLRKHFSMMILS

SEQ ID NO: 93216 - protein, 13 aa, Severe acute respiratory syndrome coronavirus 2
YLRKHFSMMILSD

SEQ ID NO: 93217 - protein, 13 aa, Severe acute respiratory syndrome coronavirus 2
LRKHFSMMILSDD

SEQ ID NO: 93218 - protein, 13 aa, Severe acute respiratory syndrome coronavirus 2
RKHFSMMILSDDA

SEQ ID NO: 93219 - protein, 13 aa, Severe acute respiratory syndrome coronavirus 2
KHFSMMILSDDAV

SEQ ID NO: 93220 - protein, 13 aa, Severe acute respiratory syndrome coronavirus 2
HFSMMILSDDAVV

SEQ ID NO: 93221 - protein, 13 aa, Severe acute respiratory syndrome coronavirus 2
FSMMILSDDAVVC

SEQ ID NO: 93222 - protein, 13 aa, Severe acute respiratory syndrome coronavirus 2
SMMILSDDAVVCF

SEQ ID NO: 93223 - protein, 13 aa, Severe acute respiratory syndrome coronavirus 2
LVASIKNFKSVLY

SEQ ID NO: 93224 - protein, 13 aa, Severe acute respiratory syndrome coronavirus 2
VASIKNFKSVLYY

SEQ ID NO: 93225 - protein, 13 aa, Severe acute respiratory syndrome coronavirus 2
ASIKNFKSVLYYQ

SEQ ID NO: 93226 - protein, 13 aa, Severe acute respiratory syndrome coronavirus 2
SIKNFKSVLYYQN

SEQ ID NO: 93227 - protein, 13 aa, Severe acute respiratory syndrome coronavirus 2
IKNFKSVLYYQNN

SEQ ID NO: 93228 - protein, 13 aa, Severe acute respiratory syndrome coronavirus 2
KNFKSVLYYQNNV

SEQ ID NO: 93229 - protein, 13 aa, Severe acute respiratory syndrome coronavirus 2
NFKSVLYYQNNVF

SEQ ID NO: 93230 - protein, 13 aa, Severe acute respiratory syndrome coronavirus 2
FKSVLYYQNNVFM

SEQ ID NO: 93231 - protein, 13 aa, Severe acute respiratory syndrome coronavirus 2
KSVLYYQNNVFMS

SEQ ID NO: 93232 - protein, 13 aa, Severe acute respiratory syndrome coronavirus 2
SVLYYQNNVFMSE

SEQ ID NO: 93233 - protein, 13 aa, Severe acute respiratory syndrome coronavirus 2
VLYYQNNVFMSEA

SEQ ID NO: 93234 - protein, 13 aa, Severe acute respiratory syndrome coronavirus 2
LYYQNNVFMSEAK

SEQ ID NO: 93235 - protein, 13 aa, Severe acute respiratory syndrome coronavirus 2
YYQNNVFMSEAKC

SEQ ID NO: 93236 - protein, 13 aa, Severe acute respiratory syndrome coronavirus 2
DDIVKTDGTLMIE

SEQ ID NO: 93237 - protein, 13 aa, Severe acute respiratory syndrome coronavirus 2
DIVKTDGTLMIER

SEQ ID NO: 93238 - protein, 13 aa, Severe acute respiratory syndrome coronavirus 2
IVKTDGTLMIERF

SEQ ID NO: 93239 - protein, 13 aa, Severe acute respiratory syndrome coronavirus 2
TDGTLMIERFVSL

SEQ ID NO: 93240 - protein, 13 aa, Severe acute respiratory syndrome coronavirus 2
DGTLMIERFVSLA

SEQ ID NO: 93241 - protein, 13 aa, Severe acute respiratory syndrome coronavirus 2
GTLMIERFVSLAI

SEQ ID NO: 93242 - protein, 13 aa, Severe acute respiratory syndrome coronavirus 2
TLMIERFVSLAID

SEQ ID NO: 93243 - protein, 13 aa, Severe acute respiratory syndrome coronavirus 2
LMIERFVSLAIDA

SEQ ID NO: 93244 - protein, 13 aa, Severe acute respiratory syndrome coronavirus 2
MIERFVSLAIDAY

SEQ ID NO: 93245 - protein, 13 aa, Severe acute respiratory syndrome coronavirus 2
IERFVSLAIDAYP

SEQ ID NO: 93246 - protein, 13 aa, Severe acute respiratory syndrome coronavirus 2
ERFVSLAIDAYPL

SEQ ID NO: 93247 - protein, 13 aa, Severe acute respiratory syndrome coronavirus 2
QEYADVFHLYLQY

SEQ ID NO: 93248 - protein, 13 aa, Severe acute respiratory syndrome coronavirus 2
EYADVFHLYLQYI

SEQ ID NO: 93249 - protein, 13 aa, Severe acute respiratory syndrome coronavirus 2
YADVFHLYLQYIR

SEQ ID NO: 93250 - protein, 13 aa, Severe acute respiratory syndrome coronavirus 2
ADVFHLYLQYIRK

SEQ ID NO: 93251 - protein, 13 aa, Severe acute respiratory syndrome coronavirus 2
DVFHLYLQYIRKL

SEQ ID NO: 93252 - protein, 13 aa, Severe acute respiratory syndrome coronavirus 2
VFHLYLQYIRKLH

SEQ ID NO: 93253 - protein, 13 aa, Severe acute respiratory syndrome coronavirus 2
ELTGHMLDMYSVM

SEQ ID NO: 93254 - protein, 13 aa, Severe acute respiratory syndrome coronavirus 2
LTGHMLDMYSVML

SEQ ID NO: 93255 - protein, 13 aa, Severe acute respiratory syndrome coronavirus 2
TGHMLDMYSVMLT

SEQ ID NO: 93256 - protein, 13 aa, Severe acute respiratory syndrome coronavirus 2
GHMLDMYSVMLTN

SEQ ID NO: 93257 - protein, 13 aa, Severe acute respiratory syndrome coronavirus 2
HMLDMYSVMLTND

SEQ ID NO: 93258 - protein, 13 aa, Severe acute respiratory syndrome coronavirus 2
EPEFYEAMYTPHT

SEQ ID NO: 93259 - protein, 13 aa, Severe acute respiratory syndrome coronavirus 2
PEFYEAMYTPHTV

SEQ ID NO: 93260 - protein, 13 aa, Severe acute respiratory syndrome coronavirus 2
EFYEAMYTPHTVL

SEQ ID NO: 93261 - protein, 13 aa, Severe acute respiratory syndrome coronavirus 2
FYEAMYTPHTVLQ

SEQ ID NO: 93262 - protein, 13 aa, Severe acute respiratory syndrome coronavirus 2
DVTQLYLGGMSYY

SEQ ID NO: 93263 - protein, 13 aa, Severe acute respiratory syndrome coronavirus 2
TQLYLGGMSYYCK

SEQ ID NO: 93264 - protein, 13 aa, Severe acute respiratory syndrome coronavirus 2
GQVFGLYKNTCVG

SEQ ID NO: 93265 - protein, 13 aa, Severe acute respiratory syndrome coronavirus 2
QVFGLYKNTCVGS

SEQ ID NO: 93266 - protein, 13 aa, Severe acute respiratory syndrome coronavirus 2
EETFKLSYGIATV

SEQ ID NO: 93267 - protein, 13 aa, Severe acute respiratory syndrome coronavirus 2
ETFKLSYGIATVR

SEQ ID NO: 93268 - protein, 13 aa, Severe acute respiratory syndrome coronavirus 2
TFKLSYGIATVRE

SEQ ID NO: 93269 - protein, 13 aa, Severe acute respiratory syndrome coronavirus 2
FKLSYGIATVREV

SEQ ID NO: 93270 - protein, 13 aa, Severe acute respiratory syndrome coronavirus 2
KLSYGIATVREVL

SEQ ID NO: 93271 - protein, 13 aa, Severe acute respiratory syndrome coronavirus 2
LSYGIATVREVLS

SEQ ID NO: 93272 - protein, 13 aa, Severe acute respiratory syndrome coronavirus 2
SYGIATVREVLSD

SEQ ID NO: 93273 - protein, 13 aa, Severe acute respiratory syndrome coronavirus 2
YGIATVREVLSDR

SEQ ID NO: 93274 - protein, 13 aa, Severe acute respiratory syndrome coronavirus 2
PLNRNYVFTGYRV

SEQ ID NO: 93275 - protein, 13 aa, Severe acute respiratory syndrome coronavirus 2
LNRNYVFTGYRVT

SEQ ID NO: 93276 - protein, 13 aa, Severe acute respiratory syndrome coronavirus 2
NRNYVFTGYRVTK

SEQ ID NO: 93277 - protein, 13 aa, Severe acute respiratory syndrome coronavirus 2
RNYVFTGYRVTKN

SEQ ID NO: 93278 - protein, 13 aa, Severe acute respiratory syndrome coronavirus 2
NYVFTGYRVTKNS

SEQ ID NO: 93279 - protein, 13 aa, Severe acute respiratory syndrome coronavirus 2
VVYRGTTTYKLNV

SEQ ID NO: 93280 - protein, 13 aa, Severe acute respiratory syndrome coronavirus 2
VYRGTTTYKLNVG

SEQ ID NO: 93281 - protein, 13 aa, Severe acute respiratory syndrome coronavirus 2
VYTACSHAAVDAL

SEQ ID NO: 93282 - protein, 13 aa, Severe acute respiratory syndrome coronavirus 2
EKALKYLPIDKCS

SEQ ID NO: 93283 - protein, 13 aa, Severe acute respiratory syndrome coronavirus 2
KALKYLPIDKCSR

SEQ ID NO: 93284 - protein, 13 aa, Severe acute respiratory syndrome coronavirus 2
ALKYLPIDKCSRI

SEQ ID NO: 93285 - protein, 13 aa, Severe acute respiratory syndrome coronavirus 2
IDKCSRIIPARAR

SEQ ID NO: 93286 - protein, 13 aa, Severe acute respiratory syndrome coronavirus 2
DKCSRIIPARARV

SEQ ID NO: 93287 - protein, 13 aa, Severe acute respiratory syndrome coronavirus 2
KCSRIIPARARVE

SEQ ID NO: 93288 - protein, 13 aa, Severe acute respiratory syndrome coronavirus 2
TLEQYVFCTVNAL

SEQ ID NO: 93289 - protein, 13 aa, Severe acute respiratory syndrome coronavirus 2
LEQYVFCTVNALP

SEQ ID NO: 93290 - protein, 13 aa, Severe acute respiratory syndrome coronavirus 2
HYVYIGDPAQLPA

SEQ ID NO: 93291 - protein, 13 aa, Severe acute respiratory syndrome coronavirus 2
KGTLEPEYFNSVC

SEQ ID NO: 93292 - protein, 13 aa, Severe acute respiratory syndrome coronavirus 2
GTLEPEYFNSVCR

SEQ ID NO: 93293 - protein, 13 aa, Severe acute respiratory syndrome coronavirus 2
AWRKAVFISPYNS

SEQ ID NO: 93294 - protein, 13 aa, Severe acute respiratory syndrome coronavirus 2
WRKAVFISPYNSQ

SEQ ID NO: 93295 - protein, 13 aa, Severe acute respiratory syndrome coronavirus 2
KAVFISPYNSQNA

SEQ ID NO: 93296 - protein, 13 aa, Severe acute respiratory syndrome coronavirus 2
AVFISPYNSQNAV

SEQ ID NO: 93297 - protein, 13 aa, Severe acute respiratory syndrome coronavirus 2
VFISPYNSQNAVA

SEQ ID NO: 93298 - protein, 13 aa, Severe acute respiratory syndrome coronavirus 2
FISPYNSQNAVAS

SEQ ID NO: 93299 - protein, 13 aa, Severe acute respiratory syndrome coronavirus 2
DRDLYDKLQFTSL

SEQ ID NO: 93300 - protein, 13 aa, Severe acute respiratory syndrome coronavirus 2
RDLYDKLQFTSLE

SEQ ID NO: 93301 - protein, 13 aa, Severe acute respiratory syndrome coronavirus 2
DLYDKLQFTSLEI

SEQ ID NO: 93302 - protein, 13 aa, Severe acute respiratory syndrome coronavirus 2
LYDKLQFTSLEIP

SEQ ID NO: 93303 - protein, 13 aa, Severe acute respiratory syndrome coronavirus 2
YDKLQFTSLEIPR

SEQ ID NO: 93304 - protein, 13 aa, Severe acute respiratory syndrome coronavirus 2
DKLQFTSLEIPRR

SEQ ID NO: 93305 - protein, 13 aa, Severe acute respiratory syndrome coronavirus 2
KLQFTSLEIPRRN

SEQ ID NO: 93306 - protein, 13 aa, Severe acute respiratory syndrome coronavirus 2
LQFTSLEIPRRNV

SEQ ID NO: 93307 - protein, 13 aa, Severe acute respiratory syndrome coronavirus 2
KDMTYRRLISMMG

SEQ ID NO: 93308 - protein, 13 aa, Severe acute respiratory syndrome coronavirus 2
DMTYRRLISMMGF

SEQ ID NO: 93309 - protein, 13 aa, Severe acute respiratory syndrome coronavirus 2
MTYRRLISMMGFK

SEQ ID NO: 93310 - protein, 13 aa, Severe acute respiratory syndrome coronavirus 2
TYRRLISMMGFKM

SEQ ID NO: 93311 - protein, 13 aa, Severe acute respiratory syndrome coronavirus 2
YRRLISMMGFKMN

SEQ ID NO: 93312 - protein, 13 aa, Severe acute respiratory syndrome coronavirus 2
RRLISMMGFKMNY

SEQ ID NO: 93313 - protein, 13 aa, Severe acute respiratory syndrome coronavirus 2
RLISMMGFKMNYQ

SEQ ID NO: 93314 - protein, 13 aa, Severe acute respiratory syndrome coronavirus 2
LISMMGFKMNYQV

SEQ ID NO: 93315 - protein, 13 aa, Severe acute respiratory syndrome coronavirus 2
ISMMGFKMNYQVN

SEQ ID NO: 93316 - protein, 13 aa, Severe acute respiratory syndrome coronavirus 2
SMMGFKMNYQVNG

SEQ ID NO: 93317 - protein, 13 aa, Severe acute respiratory syndrome coronavirus 2
MMGFKMNYQVNGY

SEQ ID NO: 93318 - protein, 13 aa, Severe acute respiratory syndrome coronavirus 2
MNYQVNGYPNMFI

SEQ ID NO: 93319 - protein, 13 aa, Severe acute respiratory syndrome coronavirus 2
NYQVNGYPNMFIT

SEQ ID NO: 93320 - protein, 13 aa, Severe acute respiratory syndrome coronavirus 2
YQVNGYPNMFITR

SEQ ID NO: 93321 - protein, 13 aa, Severe acute respiratory syndrome coronavirus 2
QVNGYPNMFITRE

SEQ ID NO: 93322 - protein, 13 aa, Severe acute respiratory syndrome coronavirus 2
EEAIRHVRAWIGF

SEQ ID NO: 93323 - protein, 13 aa, Severe acute respiratory syndrome coronavirus 2
EAIRHVRAWIGFD

SEQ ID NO: 93324 - protein, 13 aa, Severe acute respiratory syndrome coronavirus 2
RHVRAWIGFDVEG

SEQ ID NO: 93325 - protein, 13 aa, Severe acute respiratory syndrome coronavirus 2
HVRAWIGFDVEGC

SEQ ID NO: 93326 - protein, 13 aa, Severe acute respiratory syndrome coronavirus 2
PWNVVRLKIVQML

SEQ ID NO: 93327 - protein, 13 aa, Severe acute respiratory syndrome coronavirus 2
WNVVRLKIVQMLS

SEQ ID NO: 93328 - protein, 13 aa, Severe acute respiratory syndrome coronavirus 2
NVVRLKIVQMLSD

SEQ ID NO: 93329 - protein, 13 aa, Severe acute respiratory syndrome coronavirus 2
VVRLKIVQMLSDT

SEQ ID NO: 93330 - protein, 13 aa, Severe acute respiratory syndrome coronavirus 2
VRLKIVQMLSDTL

SEQ ID NO: 93331 - protein, 13 aa, Severe acute respiratory syndrome coronavirus 2
RLKIVQMLSDTLK

SEQ ID NO: 93332 - protein, 13 aa, Severe acute respiratory syndrome coronavirus 2
SDRVVFVLWAHGF

SEQ ID NO: 93333 - protein, 13 aa, Severe acute respiratory syndrome coronavirus 2
DRVVFVLWAHGFE

SEQ ID NO: 93334 - protein, 13 aa, Severe acute respiratory syndrome coronavirus 2
RVVFVLWAHGFEL

SEQ ID NO: 93335 - protein, 13 aa, Severe acute respiratory syndrome coronavirus 2
VVFVLWAHGFELT

SEQ ID NO: 93336 - protein, 13 aa, Severe acute respiratory syndrome coronavirus 2
VFVLWAHGFELTS

SEQ ID NO: 93337 - protein, 13 aa, Severe acute respiratory syndrome coronavirus 2
FVLWAHGFELTSM

SEQ ID NO: 93338 - protein, 13 aa, Severe acute respiratory syndrome coronavirus 2
VLWAHGFELTSMK

SEQ ID NO: 93339 - protein, 13 aa, Severe acute respiratory syndrome coronavirus 2
LWAHGFELTSMKY

SEQ ID NO: 93340 - protein, 13 aa, Severe acute respiratory syndrome coronavirus 2
WAHGFELTSMKYF

SEQ ID NO: 93341 - protein, 13 aa, Severe acute respiratory syndrome coronavirus 2
AHGFELTSMKYFV

SEQ ID NO: 93342 - protein, 13 aa, Severe acute respiratory syndrome coronavirus 2
HGFELTSMKYFVK

SEQ ID NO: 93343 - protein, 13 aa, Severe acute respiratory syndrome coronavirus 2
GFELTSMKYFVKI

SEQ ID NO: 93344 - protein, 13 aa, Severe acute respiratory syndrome coronavirus 2
FELTSMKYFVKIG

SEQ ID NO: 93345 - protein, 13 aa, Severe acute respiratory syndrome coronavirus 2
SMKYFVKIGPERT

SEQ ID NO: 93346 - protein, 13 aa, Severe acute respiratory syndrome coronavirus 2
MKYFVKIGPERTC

SEQ ID NO: 93347 - protein, 13 aa, Severe acute respiratory syndrome coronavirus 2
KYFVKIGPERTCC

SEQ ID NO: 93348 - protein, 13 aa, Severe acute respiratory syndrome coronavirus 2
YFVKIGPERTCCL

SEQ ID NO: 93349 - protein, 13 aa, Severe acute respiratory syndrome coronavirus 2
DYVYNPFMIDVQQ

SEQ ID NO: 93350 - protein, 13 aa, Severe acute respiratory syndrome coronavirus 2
YVYNPFMIDVQQW

SEQ ID NO: 93351 - protein, 13 aa, Severe acute respiratory syndrome coronavirus 2
DELKINAACRKVQ

SEQ ID NO: 93352 - protein, 13 aa, Severe acute respiratory syndrome coronavirus 2
ELKINAACRKVQH

SEQ ID NO: 93353 - protein, 13 aa, Severe acute respiratory syndrome coronavirus 2
SDKAYKIEELFYS

SEQ ID NO: 93354 - protein, 13 aa, Severe acute respiratory syndrome coronavirus 2
DKAYKIEELFYSY

SEQ ID NO: 93355 - protein, 13 aa, Severe acute respiratory syndrome coronavirus 2
DGVCLFWNCNVDR

SEQ ID NO: 93356 - protein, 13 aa, Severe acute respiratory syndrome coronavirus 2
GVCLFWNCNVDRY

SEQ ID NO: 93357 - protein, 13 aa, Severe acute respiratory syndrome coronavirus 2
VCLFWNCNVDRYP

SEQ ID NO: 93358 - protein, 13 aa, Severe acute respiratory syndrome coronavirus 2
NSIVCRFDTRVLS

SEQ ID NO: 93359 - protein, 13 aa, Severe acute respiratory syndrome coronavirus 2
SIVCRFDTRVLSN

SEQ ID NO: 93360 - protein, 13 aa, Severe acute respiratory syndrome coronavirus 2
IVCRFDTRVLSNL

SEQ ID NO: 93361 - protein, 13 aa, Severe acute respiratory syndrome coronavirus 2
VCRFDTRVLSNLN

SEQ ID NO: 93362 - protein, 13 aa, Severe acute respiratory syndrome coronavirus 2
DKSAFVNLKQLPF

SEQ ID NO: 93363 - protein, 13 aa, Severe acute respiratory syndrome coronavirus 2
KSAFVNLKQLPFF

SEQ ID NO: 93364 - protein, 13 aa, Severe acute respiratory syndrome coronavirus 2
SAFVNLKQLPFFY

SEQ ID NO: 93365 - protein, 13 aa, Severe acute respiratory syndrome coronavirus 2
AFVNLKQLPFFYY

SEQ ID NO: 93366 - protein, 13 aa, Severe acute respiratory syndrome coronavirus 2
FVNLKQLPFFYYS

SEQ ID NO: 93367 - protein, 13 aa, Severe acute respiratory syndrome coronavirus 2
VNLKQLPFFYYSD

SEQ ID NO: 93368 - protein, 13 aa, Severe acute respiratory syndrome coronavirus 2
NLKQLPFFYYSDS

SEQ ID NO: 93369 - protein, 13 aa, Severe acute respiratory syndrome coronavirus 2
LKQLPFFYYSDSP

SEQ ID NO: 93370 - protein, 13 aa, Severe acute respiratory syndrome coronavirus 2
LPFFYYSDSPCES

SEQ ID NO: 93371 - protein, 13 aa, Severe acute respiratory syndrome coronavirus 2
PFFYYSDSPCESH

SEQ ID NO: 93372 - protein, 13 aa, Severe acute respiratory syndrome coronavirus 2
SDIDYVPLKSATC

SEQ ID NO: 93373 - protein, 13 aa, Severe acute respiratory syndrome coronavirus 2
DIDYVPLKSATCI

SEQ ID NO: 93374 - protein, 13 aa, Severe acute respiratory syndrome coronavirus 2
IDYVPLKSATCIT

SEQ ID NO: 93375 - protein, 13 aa, Severe acute respiratory syndrome coronavirus 2
DYVPLKSATCITR

SEQ ID NO: 93376 - protein, 13 aa, Severe acute respiratory syndrome coronavirus 2
YVPLKSATCITRC

SEQ ID NO: 93377 - protein, 13 aa, Severe acute respiratory syndrome coronavirus 2
ISAGFSLWVYKQF

SEQ ID NO: 93378 - protein, 13 aa, Severe acute respiratory syndrome coronavirus 2
SAGFSLWVYKQFD

SEQ ID NO: 93379 - protein, 13 aa, Severe acute respiratory syndrome coronavirus 2
AGFSLWVYKQFDT

SEQ ID NO: 93380 - protein, 13 aa, Severe acute respiratory syndrome coronavirus 2
GFSLWVYKQFDTY

SEQ ID NO: 93381 - protein, 13 aa, Severe acute respiratory syndrome coronavirus 2
FSLWVYKQFDTYN

SEQ ID NO: 93382 - protein, 13 aa, Severe acute respiratory syndrome coronavirus 2
SLWVYKQFDTYNL

SEQ ID NO: 93383 - protein, 13 aa, Severe acute respiratory syndrome coronavirus 2
LWVYKQFDTYNLW

SEQ ID NO: 93384 - protein, 13 aa, Severe acute respiratory syndrome coronavirus 2
WVYKQFDTYNLWN

SEQ ID NO: 93385 - protein, 13 aa, Severe acute respiratory syndrome coronavirus 2
YKQFDTYNLWNTF

SEQ ID NO: 93386 - protein, 13 aa, Severe acute respiratory syndrome coronavirus 2
KQFDTYNLWNTFT

SEQ ID NO: 93387 - protein, 13 aa, Severe acute respiratory syndrome coronavirus 2
FDTYNLWNTFTRL

SEQ ID NO: 93388 - protein, 13 aa, Severe acute respiratory syndrome coronavirus 2
DTYNLWNTFTRLQ

SEQ ID NO: 93389 - protein, 13 aa, Severe acute respiratory syndrome coronavirus 2
TLPVNVAFELWAK

SEQ ID NO: 93390 - protein, 13 aa, Severe acute respiratory syndrome coronavirus 2
LPVNVAFELWAKR

SEQ ID NO: 93391 - protein, 13 aa, Severe acute respiratory syndrome coronavirus 2
PVNVAFELWAKRN

SEQ ID NO: 93392 - protein, 13 aa, Severe acute respiratory syndrome coronavirus 2
VNVAFELWAKRNI

SEQ ID NO: 93393 - protein, 13 aa, Severe acute respiratory syndrome coronavirus 2
NVAFELWAKRNIK

SEQ ID NO: 93394 - protein, 13 aa, Severe acute respiratory syndrome coronavirus 2
APAHISTIGVCSM

SEQ ID NO: 93395 - protein, 13 aa, Severe acute respiratory syndrome coronavirus 2
PAHISTIGVCSMT

SEQ ID NO: 93396 - protein, 13 aa, Severe acute respiratory syndrome coronavirus 2
AHISTIGVCSMTD

SEQ ID NO: 93397 - protein, 13 aa, Severe acute respiratory syndrome coronavirus 2
QASLNGVTLIGEA

SEQ ID NO: 93398 - protein, 13 aa, Severe acute respiratory syndrome coronavirus 2
FNYYKKVDGVVQQ

SEQ ID NO: 93399 - protein, 13 aa, Severe acute respiratory syndrome coronavirus 2
NYYKKVDGVVQQL

SEQ ID NO: 93400 - protein, 13 aa, Severe acute respiratory syndrome coronavirus 2
ETYFTQSRNLQEF

SEQ ID NO: 93401 - protein, 13 aa, Severe acute respiratory syndrome coronavirus 2
TYFTQSRNLQEFK

SEQ ID NO: 93402 - protein, 13 aa, Severe acute respiratory syndrome coronavirus 2
YFTQSRNLQEFKP

SEQ ID NO: 93403 - protein, 13 aa, Severe acute respiratory syndrome coronavirus 2
FIERYKLEGYAFE

SEQ ID NO: 93404 - protein, 13 aa, Severe acute respiratory syndrome coronavirus 2
QLGGLHLLIGLAK

SEQ ID NO: 93405 - protein, 13 aa, Severe acute respiratory syndrome coronavirus 2
KCVCSVIDLLLDD

SEQ ID NO: 93406 - protein, 13 aa, Severe acute respiratory syndrome coronavirus 2
CVCSVIDLLLDDF

SEQ ID NO: 93407 - protein, 13 aa, Severe acute respiratory syndrome coronavirus 2
VIDLLLDDFVEII

SEQ ID NO: 93408 - protein, 13 aa, Severe acute respiratory syndrome coronavirus 2
IDLLLDDFVEIIK

SEQ ID NO: 93409 - protein, 13 aa, Severe acute respiratory syndrome coronavirus 2
DLLLDDFVEIIKS

SEQ ID NO: 93410 - protein, 13 aa, Severe acute respiratory syndrome coronavirus 2
LLLDDFVEIIKSQ

SEQ ID NO: 93411 - protein, 13 aa, Severe acute respiratory syndrome coronavirus 2
EIIKSQDLSVVSK

SEQ ID NO: 93412 - protein, 13 aa, Severe acute respiratory syndrome coronavirus 2
IIKSQDLSVVSKV

SEQ ID NO: 93413 - protein, 13 aa, Severe acute respiratory syndrome coronavirus 2
DYTEISFMLWCKD

SEQ ID NO: 93414 - protein, 13 aa, Severe acute respiratory syndrome coronavirus 2
YTEISFMLWCKDG

SEQ ID NO: 93415 - protein, 13 aa, Severe acute respiratory syndrome coronavirus 2
SSQAWQPGVAMPN

SEQ ID NO: 93416 - protein, 13 aa, Severe acute respiratory syndrome coronavirus 2
SQAWQPGVAMPNL

SEQ ID NO: 93417 - protein, 13 aa, Severe acute respiratory syndrome coronavirus 2
QAWQPGVAMPNLY

SEQ ID NO: 93418 - protein, 13 aa, Severe acute respiratory syndrome coronavirus 2
AWQPGVAMPNLYK

SEQ ID NO: 93419 - protein, 13 aa, Severe acute respiratory syndrome coronavirus 2
LPKGIMMNVAKYT

SEQ ID NO: 93420 - protein, 13 aa, Severe acute respiratory syndrome coronavirus 2
PKGIMMNVAKYTQ

SEQ ID NO: 93421 - protein, 13 aa, Severe acute respiratory syndrome coronavirus 2
KGIMMNVAKYTQL

SEQ ID NO: 93422 - protein, 13 aa, Severe acute respiratory syndrome coronavirus 2
GIMMNVAKYTQLC

SEQ ID NO: 93423 - protein, 13 aa, Severe acute respiratory syndrome coronavirus 2
IMMNVAKYTQLCQ

SEQ ID NO: 93424 - protein, 13 aa, Severe acute respiratory syndrome coronavirus 2
YTQLCQYLNTLTL

SEQ ID NO: 93425 - protein, 13 aa, Severe acute respiratory syndrome coronavirus 2
TQLCQYLNTLTLA

SEQ ID NO: 93426 - protein, 13 aa, Severe acute respiratory syndrome coronavirus 2
QLCQYLNTLTLAV

SEQ ID NO: 93427 - protein, 13 aa, Severe acute respiratory syndrome coronavirus 2
LCQYLNTLTLAVP

SEQ ID NO: 93428 - protein, 13 aa, Severe acute respiratory syndrome coronavirus 2
CQYLNTLTLAVPY

SEQ ID NO: 93429 - protein, 13 aa, Severe acute respiratory syndrome coronavirus 2
QYLNTLTLAVPYN

SEQ ID NO: 93430 - protein, 13 aa, Severe acute respiratory syndrome coronavirus 2
LTLAVPYNMRVIH

SEQ ID NO: 93431 - protein, 13 aa, Severe acute respiratory syndrome coronavirus 2
VLRQWLPTGTLLV

SEQ ID NO: 93432 - protein, 13 aa, Severe acute respiratory syndrome coronavirus 2
LRQWLPTGTLLVD

SEQ ID NO: 93433 - protein, 13 aa, Severe acute respiratory syndrome coronavirus 2
RQWLPTGTLLVDS

SEQ ID NO: 93434 - protein, 13 aa, Severe acute respiratory syndrome coronavirus 2
QWLPTGTLLVDSD

SEQ ID NO: 93435 - protein, 13 aa, Severe acute respiratory syndrome coronavirus 2
KEGFFTYICGFIQ

SEQ ID NO: 93436 - protein, 13 aa, Severe acute respiratory syndrome coronavirus 2
EGFFTYICGFIQQ

SEQ ID NO: 93437 - protein, 13 aa, Severe acute respiratory syndrome coronavirus 2
LALGGSVAIKITE

SEQ ID NO: 93438 - protein, 13 aa, Severe acute respiratory syndrome coronavirus 2
ALGGSVAIKITEH

SEQ ID NO: 93439 - protein, 13 aa, Severe acute respiratory syndrome coronavirus 2
LGGSVAIKITEHS

SEQ ID NO: 93440 - protein, 13 aa, Severe acute respiratory syndrome coronavirus 2
LMGHFAWWTAFVT

SEQ ID NO: 93441 - protein, 13 aa, Severe acute respiratory syndrome coronavirus 2
MGHFAWWTAFVTN

SEQ ID NO: 93442 - protein, 13 aa, Severe acute respiratory syndrome coronavirus 2
GHFAWWTAFVTNV

SEQ ID NO: 93443 - protein, 13 aa, Severe acute respiratory syndrome coronavirus 2
EAFLIGCNYLGKP

SEQ ID NO: 93444 - protein, 13 aa, Severe acute respiratory syndrome coronavirus 2
LSSYSLFDMSKFP

SEQ ID NO: 93445 - protein, 13 aa, Severe acute respiratory syndrome coronavirus 2
SSYSLFDMSKFPL

SEQ ID NO: 93446 - protein, 13 aa, Severe acute respiratory syndrome coronavirus 2
SYSLFDMSKFPLK

SEQ ID NO: 93447 - protein, 13 aa, Severe acute respiratory syndrome coronavirus 2
YSLFDMSKFPLKL

SEQ ID NO: 93448 - protein, 13 aa, Severe acute respiratory syndrome coronavirus 2
SLFDMSKFPLKLR

SEQ ID NO: 93449 - protein, 13 aa, Severe acute respiratory syndrome coronavirus 2
SKFPLKLRGTAVM

SEQ ID NO: 93450 - protein, 13 aa, Severe acute respiratory syndrome coronavirus 2
KFPLKLRGTAVMS

SEQ ID NO: 93451 - protein, 13 aa, Severe acute respiratory syndrome coronavirus 2
FPLKLRGTAVMSL

SEQ ID NO: 93452 - protein, 13 aa, Severe acute respiratory syndrome coronavirus 2
PLKLRGTAVMSLK

SEQ ID NO: 93453 - protein, 13 aa, Severe acute respiratory syndrome coronavirus 2
LKLRGTAVMSLKE

SEQ ID NO: 93454 - protein, 13 aa, Severe acute respiratory syndrome coronavirus 2
QINDMILSLLSKG

SEQ ID NO: 93455 - protein, 13 aa, Severe acute respiratory syndrome coronavirus 2
INDMILSLLSKGR

SEQ ID NO: 93456 - protein, 13 aa, Severe acute respiratory syndrome coronavirus 2
NDMILSLLSKGRL

SEQ ID NO: 93457 - protein, 13 aa, Severe acute respiratory syndrome coronavirus 2
DMILSLLSKGRLI

SEQ ID NO: 93458 - protein, 13 aa, Severe acute respiratory syndrome coronavirus 2
MILSLLSKGRLII

SEQ ID NO: 93459 - protein, 13 aa, Severe acute respiratory syndrome coronavirus 2
ILSLLSKGRLIIR

SEQ ID NO: 93460 - protein, 13 aa, Severe acute respiratory syndrome coronavirus 2
LSLLSKGRLIIRE

SEQ ID NO: 93461 - protein, 13 aa, Severe acute respiratory syndrome coronavirus 2
SLLSKGRLIIREN

SEQ ID NO: 93462 - protein, 14 aa, Severe acute respiratory syndrome coronavirus 2
FAKFLKTNCCRFQE

SEQ ID NO: 93463 - protein, 14 aa, Severe acute respiratory syndrome coronavirus 2
DEDDNLIDSYFVVK

SEQ ID NO: 93464 - protein, 14 aa, Severe acute respiratory syndrome coronavirus 2
EDDNLIDSYFVVKR

SEQ ID NO: 93465 - protein, 14 aa, Severe acute respiratory syndrome coronavirus 2
DDNLIDSYFVVKRH

SEQ ID NO: 93466 - protein, 14 aa, Severe acute respiratory syndrome coronavirus 2
DNLIDSYFVVKRHT

SEQ ID NO: 93467 - protein, 14 aa, Severe acute respiratory syndrome coronavirus 2
NLIDSYFVVKRHTF

SEQ ID NO: 93468 - protein, 14 aa, Severe acute respiratory syndrome coronavirus 2
LIDSYFVVKRHTFS

SEQ ID NO: 93469 - protein, 14 aa, Severe acute respiratory syndrome coronavirus 2
IDSYFVVKRHTFSN

SEQ ID NO: 93470 - protein, 14 aa, Severe acute respiratory syndrome coronavirus 2
DSYFVVKRHTFSNY

SEQ ID NO: 93471 - protein, 14 aa, Severe acute respiratory syndrome coronavirus 2
SYFVVKRHTFSNYQ

SEQ ID NO: 93472 - protein, 14 aa, Severe acute respiratory syndrome coronavirus 2
YFVVKRHTFSNYQH

SEQ ID NO: 93473 - protein, 14 aa, Severe acute respiratory syndrome coronavirus 2
KHDFFKFRIDGDMV

SEQ ID NO: 93474 - protein, 14 aa, Severe acute respiratory syndrome coronavirus 2
HDFFKFRIDGDMVP

SEQ ID NO: 93475 - protein, 14 aa, Severe acute respiratory syndrome coronavirus 2
DFFKFRIDGDMVPH

SEQ ID NO: 93476 - protein, 14 aa, Severe acute respiratory syndrome coronavirus 2
FFKFRIDGDMVPHI

SEQ ID NO: 93477 - protein, 14 aa, Severe acute respiratory syndrome coronavirus 2
FKFRIDGDMVPHIS

SEQ ID NO: 93478 - protein, 14 aa, Severe acute respiratory syndrome coronavirus 2
KFRIDGDMVPHISR

SEQ ID NO: 93479 - protein, 14 aa, Severe acute respiratory syndrome coronavirus 2
FRIDGDMVPHISRQ

SEQ ID NO: 93480 - protein, 14 aa, Severe acute respiratory syndrome coronavirus 2
IDGDMVPHISRQRL

SEQ ID NO: 93481 - protein, 14 aa, Severe acute respiratory syndrome coronavirus 2
DGDMVPHISRQRLT

SEQ ID NO: 93482 - protein, 14 aa, Severe acute respiratory syndrome coronavirus 2
GDMVPHISRQRLTK

SEQ ID NO: 93483 - protein, 14 aa, Severe acute respiratory syndrome coronavirus 2
DMVPHISRQRLTKY

SEQ ID NO: 93484 - protein, 14 aa, Severe acute respiratory syndrome coronavirus 2
MVPHISRQRLTKYT

SEQ ID NO: 93485 - protein, 14 aa, Severe acute respiratory syndrome coronavirus 2
VPHISRQRLTKYTM

SEQ ID NO: 93486 - protein, 14 aa, Severe acute respiratory syndrome coronavirus 2
ISRQRLTKYTMADL

SEQ ID NO: 93487 - protein, 14 aa, Severe acute respiratory syndrome coronavirus 2
SRQRLTKYTMADLV

SEQ ID NO: 93488 - protein, 14 aa, Severe acute respiratory syndrome coronavirus 2
RQRLTKYTMADLVY

SEQ ID NO: 93489 - protein, 14 aa, Severe acute respiratory syndrome coronavirus 2
QRLTKYTMADLVYA

SEQ ID NO: 93490 - protein, 14 aa, Severe acute respiratory syndrome coronavirus 2
RLTKYTMADLVYAL

SEQ ID NO: 93491 - protein, 14 aa, Severe acute respiratory syndrome coronavirus 2
LTKYTMADLVYALR

SEQ ID NO: 93492 - protein, 14 aa, Severe acute respiratory syndrome coronavirus 2
TKYTMADLVYALRH

SEQ ID NO: 93493 - protein, 14 aa, Severe acute respiratory syndrome coronavirus 2
KYTMADLVYALRHF

SEQ ID NO: 93494 - protein, 14 aa, Severe acute respiratory syndrome coronavirus 2
YTMADLVYALRHFD

SEQ ID NO: 93495 - protein, 14 aa, Severe acute respiratory syndrome coronavirus 2
TMADLVYALRHFDE

SEQ ID NO: 93496 - protein, 14 aa, Severe acute respiratory syndrome coronavirus 2
MADLVYALRHFDEG

SEQ ID NO: 93497 - protein, 14 aa, Severe acute respiratory syndrome coronavirus 2
ADLVYALRHFDEGN

SEQ ID NO: 93498 - protein, 14 aa, Severe acute respiratory syndrome coronavirus 2
LKEILVTYNCCDDD

SEQ ID NO: 93499 - protein, 14 aa, Severe acute respiratory syndrome coronavirus 2
KEILVTYNCCDDDY

SEQ ID NO: 93500 - protein, 14 aa, Severe acute respiratory syndrome coronavirus 2
WYDFVENPDILRVY

SEQ ID NO: 93501 - protein, 14 aa, Severe acute respiratory syndrome coronavirus 2
LLKTVQFCDAMRNA

SEQ ID NO: 93502 - protein, 14 aa, Severe acute respiratory syndrome coronavirus 2
LKTVQFCDAMRNAG

SEQ ID NO: 93503 - protein, 14 aa, Severe acute respiratory syndrome coronavirus 2
VQFCDAMRNAGIVG

SEQ ID NO: 93504 - protein, 14 aa, Severe acute respiratory syndrome coronavirus 2
QFCDAMRNAGIVGV

SEQ ID NO: 93505 - protein, 14 aa, Severe acute respiratory syndrome coronavirus 2
FCDAMRNAGIVGVL

SEQ ID NO: 93506 - protein, 14 aa, Severe acute respiratory syndrome coronavirus 2
CDAMRNAGIVGVLT

SEQ ID NO: 93507 - protein, 14 aa, Severe acute respiratory syndrome coronavirus 2
DAMRNAGIVGVLTL

SEQ ID NO: 93508 - protein, 14 aa, Severe acute respiratory syndrome coronavirus 2
AMRNAGIVGVLTLD

SEQ ID NO: 93509 - protein, 14 aa, Severe acute respiratory syndrome coronavirus 2
MRNAGIVGVLTLDN

SEQ ID NO: 93510 - protein, 14 aa, Severe acute respiratory syndrome coronavirus 2
RNAGIVGVLTLDNQ

SEQ ID NO: 93511 - protein, 14 aa, Severe acute respiratory syndrome coronavirus 2
NAGIVGVLTLDNQD

SEQ ID NO: 93512 - protein, 14 aa, Severe acute respiratory syndrome coronavirus 2
AGIVGVLTLDNQDL

SEQ ID NO: 93513 - protein, 14 aa, Severe acute respiratory syndrome coronavirus 2
GIVGVLTLDNQDLN

SEQ ID NO: 93514 - protein, 14 aa, Severe acute respiratory syndrome coronavirus 2
IVGVLTLDNQDLNG

SEQ ID NO: 93515 - protein, 14 aa, Severe acute respiratory syndrome coronavirus 2
SGVPVVDSYYSLLM

SEQ ID NO: 93516 - protein, 14 aa, Severe acute respiratory syndrome coronavirus 2
GVPVVDSYYSLLMP

SEQ ID NO: 93517 - protein, 14 aa, Severe acute respiratory syndrome coronavirus 2
VPVVDSYYSLLMPI

SEQ ID NO: 93518 - protein, 14 aa, Severe acute respiratory syndrome coronavirus 2
PVVDSYYSLLMPIL

SEQ ID NO: 93519 - protein, 14 aa, Severe acute respiratory syndrome coronavirus 2
VVDSYYSLLMPILT

SEQ ID NO: 93520 - protein, 14 aa, Severe acute respiratory syndrome coronavirus 2
VDSYYSLLMPILTL

SEQ ID NO: 93521 - protein, 14 aa, Severe acute respiratory syndrome coronavirus 2
DSYYSLLMPILTLT

SEQ ID NO: 93522 - protein, 14 aa, Severe acute respiratory syndrome coronavirus 2
SYYSLLMPILTLTR

SEQ ID NO: 93523 - protein, 14 aa, Severe acute respiratory syndrome coronavirus 2
DLTKPYIKWDLLKY

SEQ ID NO: 93524 - protein, 14 aa, Severe acute respiratory syndrome coronavirus 2
LTKPYIKWDLLKYD

SEQ ID NO: 93525 - protein, 14 aa, Severe acute respiratory syndrome coronavirus 2
TKPYIKWDLLKYDF

SEQ ID NO: 93526 - protein, 14 aa, Severe acute respiratory syndrome coronavirus 2
KPYIKWDLLKYDFT

SEQ ID NO: 93527 - protein, 14 aa, Severe acute respiratory syndrome coronavirus 2
PYIKWDLLKYDFTE

SEQ ID NO: 93528 - protein, 14 aa, Severe acute respiratory syndrome coronavirus 2
DRCILHCANFNVLF

SEQ ID NO: 93529 - protein, 14 aa, Severe acute respiratory syndrome coronavirus 2
RCILHCANFNVLFS

SEQ ID NO: 93530 - protein, 14 aa, Severe acute respiratory syndrome coronavirus 2
CILHCANFNVLFST

SEQ ID NO: 93531 - protein, 14 aa, Severe acute respiratory syndrome coronavirus 2
ILHCANFNVLFSTV

SEQ ID NO: 93532 - protein, 14 aa, Severe acute respiratory syndrome coronavirus 2
LHCANFNVLFSTVF

SEQ ID NO: 93533 - protein, 14 aa, Severe acute respiratory syndrome coronavirus 2
HCANFNVLFSTVFP

SEQ ID NO: 93534 - protein, 14 aa, Severe acute respiratory syndrome coronavirus 2
VRKIFVDGVPFVVS

SEQ ID NO: 93535 - protein, 14 aa, Severe acute respiratory syndrome coronavirus 2
RKIFVDGVPFVVST

SEQ ID NO: 93536 - protein, 14 aa, Severe acute respiratory syndrome coronavirus 2
KIFVDGVPFVVSTG

SEQ ID NO: 93537 - protein, 14 aa, Severe acute respiratory syndrome coronavirus 2
IFVDGVPFVVSTGY

SEQ ID NO: 93538 - protein, 14 aa, Severe acute respiratory syndrome coronavirus 2
FVDGVPFVVSTGYH

SEQ ID NO: 93539 - protein, 14 aa, Severe acute respiratory syndrome coronavirus 2
VDGVPFVVSTGYHF

SEQ ID NO: 93540 - protein, 14 aa, Severe acute respiratory syndrome coronavirus 2
DGVPFVVSTGYHFR

SEQ ID NO: 93541 - protein, 14 aa, Severe acute respiratory syndrome coronavirus 2
GVPFVVSTGYHFRE

SEQ ID NO: 93542 - protein, 14 aa, Severe acute respiratory syndrome coronavirus 2
VPFVVSTGYHFREL

SEQ ID NO: 93543 - protein, 14 aa, Severe acute respiratory syndrome coronavirus 2
PFVVSTGYHFRELG

SEQ ID NO: 93544 - protein, 14 aa, Severe acute respiratory syndrome coronavirus 2
FVVSTGYHFRELGV

SEQ ID NO: 93545 - protein, 14 aa, Severe acute respiratory syndrome coronavirus 2
VVSTGYHFRELGVV

SEQ ID NO: 93546 - protein, 14 aa, Severe acute respiratory syndrome coronavirus 2
VSTGYHFRELGVVH

SEQ ID NO: 93547 - protein, 14 aa, Severe acute respiratory syndrome coronavirus 2
STGYHFRELGVVHN

SEQ ID NO: 93548 - protein, 14 aa, Severe acute respiratory syndrome coronavirus 2
HNQDVNLHSSRLSF

SEQ ID NO: 93549 - protein, 14 aa, Severe acute respiratory syndrome coronavirus 2
NQDVNLHSSRLSFK

SEQ ID NO: 93550 - protein, 14 aa, Severe acute respiratory syndrome coronavirus 2
QDVNLHSSRLSFKE

SEQ ID NO: 93551 - protein, 14 aa, Severe acute respiratory syndrome coronavirus 2
DVNLHSSRLSFKEL

SEQ ID NO: 93552 - protein, 14 aa, Severe acute respiratory syndrome coronavirus 2
VNLHSSRLSFKELL

SEQ ID NO: 93553 - protein, 14 aa, Severe acute respiratory syndrome coronavirus 2
NLHSSRLSFKELLV

SEQ ID NO: 93554 - protein, 14 aa, Severe acute respiratory syndrome coronavirus 2
LHSSRLSFKELLVY

SEQ ID NO: 93555 - protein, 14 aa, Severe acute respiratory syndrome coronavirus 2
HSSRLSFKELLVYA

SEQ ID NO: 93556 - protein, 14 aa, Severe acute respiratory syndrome coronavirus 2
SSRLSFKELLVYAA

SEQ ID NO: 93557 - protein, 14 aa, Severe acute respiratory syndrome coronavirus 2
SRLSFKELLVYAAD

SEQ ID NO: 93558 - protein, 14 aa, Severe acute respiratory syndrome coronavirus 2
RLSFKELLVYAADP

SEQ ID NO: 93559 - protein, 14 aa, Severe acute respiratory syndrome coronavirus 2
LSFKELLVYAADPA

SEQ ID NO: 93560 - protein, 14 aa, Severe acute respiratory syndrome coronavirus 2
KPGNFNKDFYDFAV

SEQ ID NO: 93561 - protein, 14 aa, Severe acute respiratory syndrome coronavirus 2
PGNFNKDFYDFAVS

SEQ ID NO: 93562 - protein, 14 aa, Severe acute respiratory syndrome coronavirus 2
ISDYDYYRYNLPTM

SEQ ID NO: 93563 - protein, 14 aa, Severe acute respiratory syndrome coronavirus 2
SDYDYYRYNLPTMC

SEQ ID NO: 93564 - protein, 14 aa, Severe acute respiratory syndrome coronavirus 2
DYDYYRYNLPTMCD

SEQ ID NO: 93565 - protein, 14 aa, Severe acute respiratory syndrome coronavirus 2
YDYYRYNLPTMCDI

SEQ ID NO: 93566 - protein, 14 aa, Severe acute respiratory syndrome coronavirus 2
DYYRYNLPTMCDIR

SEQ ID NO: 93567 - protein, 14 aa, Severe acute respiratory syndrome coronavirus 2
YYRYNLPTMCDIRQ

SEQ ID NO: 93568 - protein, 14 aa, Severe acute respiratory syndrome coronavirus 2
YRYNLPTMCDIRQL

SEQ ID NO: 93569 - protein, 14 aa, Severe acute respiratory syndrome coronavirus 2
QVIVNNLDKSAGFP

SEQ ID NO: 93570 - protein, 14 aa, Severe acute respiratory syndrome coronavirus 2
VIVNNLDKSAGFPF

SEQ ID NO: 93571 - protein, 14 aa, Severe acute respiratory syndrome coronavirus 2
IVNNLDKSAGFPFN

SEQ ID NO: 93572 - protein, 14 aa, Severe acute respiratory syndrome coronavirus 2
VNNLDKSAGFPFNK

SEQ ID NO: 93573 - protein, 14 aa, Severe acute respiratory syndrome coronavirus 2
NNLDKSAGFPFNKW

SEQ ID NO: 93574 - protein, 14 aa, Severe acute respiratory syndrome coronavirus 2
YTKRNVIPTITQMN

SEQ ID NO: 93575 - protein, 14 aa, Severe acute respiratory syndrome coronavirus 2
TKRNVIPTITQMNL

SEQ ID NO: 93576 - protein, 14 aa, Severe acute respiratory syndrome coronavirus 2
KRNVIPTITQMNLK

SEQ ID NO: 93577 - protein, 14 aa, Severe acute respiratory syndrome coronavirus 2
RNVIPTITQMNLKY

SEQ ID NO: 93578 - protein, 14 aa, Severe acute respiratory syndrome coronavirus 2
NVIPTITQMNLKYA

SEQ ID NO: 93579 - protein, 14 aa, Severe acute respiratory syndrome coronavirus 2
VIPTITQMNLKYAI

SEQ ID NO: 93580 - protein, 14 aa, Severe acute respiratory syndrome coronavirus 2
IPTITQMNLKYAIS

SEQ ID NO: 93581 - protein, 14 aa, Severe acute respiratory syndrome coronavirus 2
PTITQMNLKYAISA

SEQ ID NO: 93582 - protein, 14 aa, Severe acute respiratory syndrome coronavirus 2
TITQMNLKYAISAK

SEQ ID NO: 93583 - protein, 14 aa, Severe acute respiratory syndrome coronavirus 2
ITQMNLKYAISAKN

SEQ ID NO: 93584 - protein, 14 aa, Severe acute respiratory syndrome coronavirus 2
TQMNLKYAISAKNR

SEQ ID NO: 93585 - protein, 14 aa, Severe acute respiratory syndrome coronavirus 2
QMNLKYAISAKNRA

SEQ ID NO: 93586 - protein, 14 aa, Severe acute respiratory syndrome coronavirus 2
MNLKYAISAKNRAR

SEQ ID NO: 93587 - protein, 14 aa, Severe acute respiratory syndrome coronavirus 2
NLKYAISAKNRART

SEQ ID NO: 93588 - protein, 14 aa, Severe acute respiratory syndrome coronavirus 2
LKYAISAKNRARTV

SEQ ID NO: 93589 - protein, 14 aa, Severe acute respiratory syndrome coronavirus 2
KYAISAKNRARTVA

SEQ ID NO: 93590 - protein, 14 aa, Severe acute respiratory syndrome coronavirus 2
YAISAKNRARTVAG

SEQ ID NO: 93591 - protein, 14 aa, Severe acute respiratory syndrome coronavirus 2
AISAKNRARTVAGV

SEQ ID NO: 93592 - protein, 14 aa, Severe acute respiratory syndrome coronavirus 2
ISAKNRARTVAGVS

SEQ ID NO: 93593 - protein, 14 aa, Severe acute respiratory syndrome coronavirus 2
SAKNRARTVAGVSI

SEQ ID NO: 93594 - protein, 14 aa, Severe acute respiratory syndrome coronavirus 2
AKNRARTVAGVSIC

SEQ ID NO: 93595 - protein, 14 aa, Severe acute respiratory syndrome coronavirus 2
KNRARTVAGVSICS

SEQ ID NO: 93596 - protein, 14 aa, Severe acute respiratory syndrome coronavirus 2
NRARTVAGVSICST

SEQ ID NO: 93597 - protein, 14 aa, Severe acute respiratory syndrome coronavirus 2
RARTVAGVSICSTM

SEQ ID NO: 93598 - protein, 14 aa, Severe acute respiratory syndrome coronavirus 2
ARTVAGVSICSTMT

SEQ ID NO: 93599 - protein, 14 aa, Severe acute respiratory syndrome coronavirus 2
RTVAGVSICSTMTN

SEQ ID NO: 93600 - protein, 14 aa, Severe acute respiratory syndrome coronavirus 2
TVAGVSICSTMTNR

SEQ ID NO: 93601 - protein, 14 aa, Severe acute respiratory syndrome coronavirus 2
VAGVSICSTMTNRQ

SEQ ID NO: 93602 - protein, 14 aa, Severe acute respiratory syndrome coronavirus 2
AGVSICSTMTNRQF

SEQ ID NO: 93603 - protein, 14 aa, Severe acute respiratory syndrome coronavirus 2
GVSICSTMTNRQFH

SEQ ID NO: 93604 - protein, 14 aa, Severe acute respiratory syndrome coronavirus 2
VSICSTMTNRQFHQ

SEQ ID NO: 93605 - protein, 14 aa, Severe acute respiratory syndrome coronavirus 2
MTNRQFHQKLLKSI

SEQ ID NO: 93606 - protein, 14 aa, Severe acute respiratory syndrome coronavirus 2
TNRQFHQKLLKSIA

SEQ ID NO: 93607 - protein, 14 aa, Severe acute respiratory syndrome coronavirus 2
NRQFHQKLLKSIAA

SEQ ID NO: 93608 - protein, 14 aa, Severe acute respiratory syndrome coronavirus 2
RQFHQKLLKSIAAT

SEQ ID NO: 93609 - protein, 14 aa, Severe acute respiratory syndrome coronavirus 2
QFHQKLLKSIAATR

SEQ ID NO: 93610 - protein, 14 aa, Severe acute respiratory syndrome coronavirus 2
FHQKLLKSIAATRG

SEQ ID NO: 93611 - protein, 14 aa, Severe acute respiratory syndrome coronavirus 2
HQKLLKSIAATRGA

SEQ ID NO: 93612 - protein, 14 aa, Severe acute respiratory syndrome coronavirus 2
QKLLKSIAATRGAT

SEQ ID NO: 93613 - protein, 14 aa, Severe acute respiratory syndrome coronavirus 2
TSKFYGGWHNMLKT

SEQ ID NO: 93614 - protein, 14 aa, Severe acute respiratory syndrome coronavirus 2
SKFYGGWHNMLKTV

SEQ ID NO: 93615 - protein, 14 aa, Severe acute respiratory syndrome coronavirus 2
KFYGGWHNMLKTVY

SEQ ID NO: 93616 - protein, 14 aa, Severe acute respiratory syndrome coronavirus 2
GGSLYVKPGGTSSG

SEQ ID NO: 93617 - protein, 14 aa, Severe acute respiratory syndrome coronavirus 2
GSLYVKPGGTSSGD

SEQ ID NO: 93618 - protein, 14 aa, Severe acute respiratory syndrome coronavirus 2
SLYVKPGGTSSGDA

SEQ ID NO: 93619 - protein, 14 aa, Severe acute respiratory syndrome coronavirus 2
LYVKPGGTSSGDAT

SEQ ID NO: 93620 - protein, 14 aa, Severe acute respiratory syndrome coronavirus 2
YVKPGGTSSGDATT

SEQ ID NO: 93621 - protein, 14 aa, Severe acute respiratory syndrome coronavirus 2
VKPGGTSSGDATTA

SEQ ID NO: 93622 - protein, 14 aa, Severe acute respiratory syndrome coronavirus 2
KPGGTSSGDATTAY

SEQ ID NO: 93623 - protein, 14 aa, Severe acute respiratory syndrome coronavirus 2
PGGTSSGDATTAYA

SEQ ID NO: 93624 - protein, 14 aa, Severe acute respiratory syndrome coronavirus 2
GGTSSGDATTAYAN

SEQ ID NO: 93625 - protein, 14 aa, Severe acute respiratory syndrome coronavirus 2
GTSSGDATTAYANS

SEQ ID NO: 93626 - protein, 14 aa, Severe acute respiratory syndrome coronavirus 2
TSSGDATTAYANSV

SEQ ID NO: 93627 - protein, 14 aa, Severe acute respiratory syndrome coronavirus 2
SSGDATTAYANSVF

SEQ ID NO: 93628 - protein, 14 aa, Severe acute respiratory syndrome coronavirus 2
SGDATTAYANSVFN

SEQ ID NO: 93629 - protein, 14 aa, Severe acute respiratory syndrome coronavirus 2
GDATTAYANSVFNI

SEQ ID NO: 93630 - protein, 14 aa, Severe acute respiratory syndrome coronavirus 2
DATTAYANSVFNIC

SEQ ID NO: 93631 - protein, 14 aa, Severe acute respiratory syndrome coronavirus 2
ATTAYANSVFNICQ

SEQ ID NO: 93632 - protein, 14 aa, Severe acute respiratory syndrome coronavirus 2
TTAYANSVFNICQA

SEQ ID NO: 93633 - protein, 14 aa, Severe acute respiratory syndrome coronavirus 2
TAYANSVFNICQAV

SEQ ID NO: 93634 - protein, 14 aa, Severe acute respiratory syndrome coronavirus 2
AYANSVFNICQAVT

SEQ ID NO: 93635 - protein, 14 aa, Severe acute respiratory syndrome coronavirus 2
YANSVFNICQAVTA

SEQ ID NO: 93636 - protein, 14 aa, Severe acute respiratory syndrome coronavirus 2
ANSVFNICQAVTAN

SEQ ID NO: 93637 - protein, 14 aa, Severe acute respiratory syndrome coronavirus 2
NSVFNICQAVTANV

SEQ ID NO: 93638 - protein, 14 aa, Severe acute respiratory syndrome coronavirus 2
SVFNICQAVTANVN

SEQ ID NO: 93639 - protein, 14 aa, Severe acute respiratory syndrome coronavirus 2
VFNICQAVTANVNA

SEQ ID NO: 93640 - protein, 14 aa, Severe acute respiratory syndrome coronavirus 2
FNICQAVTANVNAL

SEQ ID NO: 93641 - protein, 14 aa, Severe acute respiratory syndrome coronavirus 2
NICQAVTANVNALL

SEQ ID NO: 93642 - protein, 14 aa, Severe acute respiratory syndrome coronavirus 2
ICQAVTANVNALLS

SEQ ID NO: 93643 - protein, 14 aa, Severe acute respiratory syndrome coronavirus 2
CQAVTANVNALLST

SEQ ID NO: 93644 - protein, 14 aa, Severe acute respiratory syndrome coronavirus 2
QAVTANVNALLSTD

SEQ ID NO: 93645 - protein, 14 aa, Severe acute respiratory syndrome coronavirus 2
AVTANVNALLSTDG

SEQ ID NO: 93646 - protein, 14 aa, Severe acute respiratory syndrome coronavirus 2
VTANVNALLSTDGN

SEQ ID NO: 93647 - protein, 14 aa, Severe acute respiratory syndrome coronavirus 2
ANVNALLSTDGNKI

SEQ ID NO: 93648 - protein, 14 aa, Severe acute respiratory syndrome coronavirus 2
NVNALLSTDGNKIA

SEQ ID NO: 93649 - protein, 14 aa, Severe acute respiratory syndrome coronavirus 2
VNALLSTDGNKIAD

SEQ ID NO: 93650 - protein, 14 aa, Severe acute respiratory syndrome coronavirus 2
NALLSTDGNKIADK

SEQ ID NO: 93651 - protein, 14 aa, Severe acute respiratory syndrome coronavirus 2
ALLSTDGNKIADKY

SEQ ID NO: 93652 - protein, 14 aa, Severe acute respiratory syndrome coronavirus 2
KIADKYVRNLQHRL

SEQ ID NO: 93653 - protein, 14 aa, Severe acute respiratory syndrome coronavirus 2
IADKYVRNLQHRLY

SEQ ID NO: 93654 - protein, 14 aa, Severe acute respiratory syndrome coronavirus 2
ADKYVRNLQHRLYE

SEQ ID NO: 93655 - protein, 14 aa, Severe acute respiratory syndrome coronavirus 2
DKYVRNLQHRLYEC

SEQ ID NO: 93656 - protein, 14 aa, Severe acute respiratory syndrome coronavirus 2
KYVRNLQHRLYECL

SEQ ID NO: 93657 - protein, 14 aa, Severe acute respiratory syndrome coronavirus 2
YVRNLQHRLYECLY

SEQ ID NO: 93658 - protein, 14 aa, Severe acute respiratory syndrome coronavirus 2
VRNLQHRLYECLYR

SEQ ID NO: 93659 - protein, 14 aa, Severe acute respiratory syndrome coronavirus 2
FYAYLRKHFSMMIL

SEQ ID NO: 93660 - protein, 14 aa, Severe acute respiratory syndrome coronavirus 2
YAYLRKHFSMMILS

SEQ ID NO: 93661 - protein, 14 aa, Severe acute respiratory syndrome coronavirus 2
AYLRKHFSMMILSD

SEQ ID NO: 93662 - protein, 14 aa, Severe acute respiratory syndrome coronavirus 2
YLRKHFSMMILSDD

SEQ ID NO: 93663 - protein, 14 aa, Severe acute respiratory syndrome coronavirus 2
LRKHFSMMILSDDA

SEQ ID NO: 93664 - protein, 14 aa, Severe acute respiratory syndrome coronavirus 2
RKHFSMMILSDDAV

SEQ ID NO: 93665 - protein, 14 aa, Severe acute respiratory syndrome coronavirus 2
KHFSMMILSDDAVV

SEQ ID NO: 93666 - protein, 14 aa, Severe acute respiratory syndrome coronavirus 2
HFSMMILSDDAVVC

SEQ ID NO: 93667 - protein, 14 aa, Severe acute respiratory syndrome coronavirus 2
FSMMILSDDAVVCF

SEQ ID NO: 93668 - protein, 14 aa, Severe acute respiratory syndrome coronavirus 2
LVASIKNFKSVLYY

SEQ ID NO: 93669 - protein, 14 aa, Severe acute respiratory syndrome coronavirus 2
VASIKNFKSVLYYQ

SEQ ID NO: 93670 - protein, 14 aa, Severe acute respiratory syndrome coronavirus 2
ASIKNFKSVLYYQN

SEQ ID NO: 93671 - protein, 14 aa, Severe acute respiratory syndrome coronavirus 2
SIKNFKSVLYYQNN

SEQ ID NO: 93672 - protein, 14 aa, Severe acute respiratory syndrome coronavirus 2
IKNFKSVLYYQNNV

SEQ ID NO: 93673 - protein, 14 aa, Severe acute respiratory syndrome coronavirus 2
KNFKSVLYYQNNVF

SEQ ID NO: 93674 - protein, 14 aa, Severe acute respiratory syndrome coronavirus 2
NFKSVLYYQNNVFM

SEQ ID NO: 93675 - protein, 14 aa, Severe acute respiratory syndrome coronavirus 2
FKSVLYYQNNVFMS

SEQ ID NO: 93676 - protein, 14 aa, Severe acute respiratory syndrome coronavirus 2
KSVLYYQNNVFMSE

SEQ ID NO: 93677 - protein, 14 aa, Severe acute respiratory syndrome coronavirus 2
SVLYYQNNVFMSEA

SEQ ID NO: 93678 - protein, 14 aa, Severe acute respiratory syndrome coronavirus 2
VLYYQNNVFMSEAK

SEQ ID NO: 93679 - protein, 14 aa, Severe acute respiratory syndrome coronavirus 2
LYYQNNVFMSEAKC

SEQ ID NO: 93680 - protein, 14 aa, Severe acute respiratory syndrome coronavirus 2
YYQNNVFMSEAKCW

SEQ ID NO: 93681 - protein, 14 aa, Severe acute respiratory syndrome coronavirus 2
DPSRILGAGCFVDD

SEQ ID NO: 93682 - protein, 14 aa, Severe acute respiratory syndrome coronavirus 2
PSRILGAGCFVDDI

SEQ ID NO: 93683 - protein, 14 aa, Severe acute respiratory syndrome coronavirus 2
SRILGAGCFVDDIV

SEQ ID NO: 93684 - protein, 14 aa, Severe acute respiratory syndrome coronavirus 2
RILGAGCFVDDIVK

SEQ ID NO: 93685 - protein, 14 aa, Severe acute respiratory syndrome coronavirus 2
ILGAGCFVDDIVKT

SEQ ID NO: 93686 - protein, 14 aa, Severe acute respiratory syndrome coronavirus 2
FVDDIVKTDGTLMI

SEQ ID NO: 93687 - protein, 14 aa, Severe acute respiratory syndrome coronavirus 2
VDDIVKTDGTLMIE

SEQ ID NO: 93688 - protein, 14 aa, Severe acute respiratory syndrome coronavirus 2
DDIVKTDGTLMIER

SEQ ID NO: 93689 - protein, 14 aa, Severe acute respiratory syndrome coronavirus 2
DIVKTDGTLMIERF

SEQ ID NO: 93690 - protein, 14 aa, Severe acute respiratory syndrome coronavirus 2
IVKTDGTLMIERFV

SEQ ID NO: 93691 - protein, 14 aa, Severe acute respiratory syndrome coronavirus 2
VKTDGTLMIERFVS

SEQ ID NO: 93692 - protein, 14 aa, Severe acute respiratory syndrome coronavirus 2
KTDGTLMIERFVSL

SEQ ID NO: 93693 - protein, 14 aa, Severe acute respiratory syndrome coronavirus 2
TDGTLMIERFVSLA

SEQ ID NO: 93694 - protein, 14 aa, Severe acute respiratory syndrome coronavirus 2
DGTLMIERFVSLAI

SEQ ID NO: 93695 - protein, 14 aa, Severe acute respiratory syndrome coronavirus 2
GTLMIERFVSLAID

SEQ ID NO: 93696 - protein, 14 aa, Severe acute respiratory syndrome coronavirus 2
TLMIERFVSLAIDA

SEQ ID NO: 93697 - protein, 14 aa, Severe acute respiratory syndrome coronavirus 2
LMIERFVSLAIDAY

SEQ ID NO: 93698 - protein, 14 aa, Severe acute respiratory syndrome coronavirus 2
MIERFVSLAIDAYP

SEQ ID NO: 93699 - protein, 14 aa, Severe acute respiratory syndrome coronavirus 2
IERFVSLAIDAYPL

SEQ ID NO: 93700 - protein, 14 aa, Severe acute respiratory syndrome coronavirus 2
QEYADVFHLYLQYI

SEQ ID NO: 93701 - protein, 14 aa, Severe acute respiratory syndrome coronavirus 2
EYADVFHLYLQYIR

SEQ ID NO: 93702 - protein, 14 aa, Severe acute respiratory syndrome coronavirus 2
YADVFHLYLQYIRK

SEQ ID NO: 93703 - protein, 14 aa, Severe acute respiratory syndrome coronavirus 2
ADVFHLYLQYIRKL

SEQ ID NO: 93704 - protein, 14 aa, Severe acute respiratory syndrome coronavirus 2
DVFHLYLQYIRKLH

SEQ ID NO: 93705 - protein, 14 aa, Severe acute respiratory syndrome coronavirus 2
ELTGHMLDMYSVML

SEQ ID NO: 93706 - protein, 14 aa, Severe acute respiratory syndrome coronavirus 2
LTGHMLDMYSVMLT

SEQ ID NO: 93707 - protein, 14 aa, Severe acute respiratory syndrome coronavirus 2
TGHMLDMYSVMLTN

SEQ ID NO: 93708 - protein, 14 aa, Severe acute respiratory syndrome coronavirus 2
GHMLDMYSVMLTND

SEQ ID NO: 93709 - protein, 14 aa, Severe acute respiratory syndrome coronavirus 2
EPEFYEAMYTPHTV

SEQ ID NO: 93710 - protein, 14 aa, Severe acute respiratory syndrome coronavirus 2
PEFYEAMYTPHTVL

SEQ ID NO: 93711 - protein, 14 aa, Severe acute respiratory syndrome coronavirus 2
EFYEAMYTPHTVLQ

SEQ ID NO: 93712 - protein, 14 aa, Severe acute respiratory syndrome coronavirus 2
TDVTQLYLGGMSYY

SEQ ID NO: 93713 - protein, 14 aa, Severe acute respiratory syndrome coronavirus 2
DVTQLYLGGMSYYC

SEQ ID NO: 93714 - protein, 14 aa, Severe acute respiratory syndrome coronavirus 2
VTQLYLGGMSYYCK

SEQ ID NO: 93715 - protein, 14 aa, Severe acute respiratory syndrome coronavirus 2
SFPLCANGQVFGLY

SEQ ID NO: 93716 - protein, 14 aa, Severe acute respiratory syndrome coronavirus 2
FPLCANGQVFGLYK

SEQ ID NO: 93717 - protein, 14 aa, Severe acute respiratory syndrome coronavirus 2
PLCANGQVFGLYKN

SEQ ID NO: 93718 - protein, 14 aa, Severe acute respiratory syndrome coronavirus 2
ANGQVFGLYKNTCV

SEQ ID NO: 93719 - protein, 14 aa, Severe acute respiratory syndrome coronavirus 2
NGQVFGLYKNTCVG

SEQ ID NO: 93720 - protein, 14 aa, Severe acute respiratory syndrome coronavirus 2
GQVFGLYKNTCVGS

SEQ ID NO: 93721 - protein, 14 aa, Severe acute respiratory syndrome coronavirus 2
QVFGLYKNTCVGSD

SEQ ID NO: 93722 - protein, 14 aa, Severe acute respiratory syndrome coronavirus 2
TCDWTNAGDYILAN

SEQ ID NO: 93723 - protein, 14 aa, Severe acute respiratory syndrome coronavirus 2
CDWTNAGDYILANT

SEQ ID NO: 93724 - protein, 14 aa, Severe acute respiratory syndrome coronavirus 2
DWTNAGDYILANTC

SEQ ID NO: 93725 - protein, 14 aa, Severe acute respiratory syndrome coronavirus 2
EETFKLSYGIATVR

SEQ ID NO: 93726 - protein, 14 aa, Severe acute respiratory syndrome coronavirus 2
ETFKLSYGIATVRE

SEQ ID NO: 93727 - protein, 14 aa, Severe acute respiratory syndrome coronavirus 2
TFKLSYGIATVREV

SEQ ID NO: 93728 - protein, 14 aa, Severe acute respiratory syndrome coronavirus 2
FKLSYGIATVREVL

SEQ ID NO: 93729 - protein, 14 aa, Severe acute respiratory syndrome coronavirus 2
KLSYGIATVREVLS

SEQ ID NO: 93730 - protein, 14 aa, Severe acute respiratory syndrome coronavirus 2
LSYGIATVREVLSD

SEQ ID NO: 93731 - protein, 14 aa, Severe acute respiratory syndrome coronavirus 2
SYGIATVREVLSDR

SEQ ID NO: 93732 - protein, 14 aa, Severe acute respiratory syndrome coronavirus 2
YGIATVREVLSDRE

SEQ ID NO: 93733 - protein, 14 aa, Severe acute respiratory syndrome coronavirus 2
RPPLNRNYVFTGYR

SEQ ID NO: 93734 - protein, 14 aa, Severe acute respiratory syndrome coronavirus 2
PPLNRNYVFTGYRV

SEQ ID NO: 93735 - protein, 14 aa, Severe acute respiratory syndrome coronavirus 2
PLNRNYVFTGYRVT

SEQ ID NO: 93736 - protein, 14 aa, Severe acute respiratory syndrome coronavirus 2
LNRNYVFTGYRVTK

SEQ ID NO: 93737 - protein, 14 aa, Severe acute respiratory syndrome coronavirus 2
NRNYVFTGYRVTKN

SEQ ID NO: 93738 - protein, 14 aa, Severe acute respiratory syndrome coronavirus 2
RNYVFTGYRVTKNS

SEQ ID NO: 93739 - protein, 14 aa, Severe acute respiratory syndrome coronavirus 2
NYVFTGYRVTKNSK

SEQ ID NO: 93740 - protein, 14 aa, Severe acute respiratory syndrome coronavirus 2
VVYRGTTTYKLNVG

SEQ ID NO: 93741 - protein, 14 aa, Severe acute respiratory syndrome coronavirus 2
KYSTLQGPPGTGKS

SEQ ID NO: 93742 - protein, 14 aa, Severe acute respiratory syndrome coronavirus 2
VYTACSHAAVDALC

SEQ ID NO: 93743 - protein, 14 aa, Severe acute respiratory syndrome coronavirus 2
YTACSHAAVDALCE

SEQ ID NO: 93744 - protein, 14 aa, Severe acute respiratory syndrome coronavirus 2
TACSHAAVDALCEK

SEQ ID NO: 93745 - protein, 14 aa, Severe acute respiratory syndrome coronavirus 2
ACSHAAVDALCEKA

SEQ ID NO: 93746 - protein, 14 aa, Severe acute respiratory syndrome coronavirus 2
VDALCEKALKYLPI

SEQ ID NO: 93747 - protein, 14 aa, Severe acute respiratory syndrome coronavirus 2
DALCEKALKYLPID

SEQ ID NO: 93748 - protein, 14 aa, Severe acute respiratory syndrome coronavirus 2
ALCEKALKYLPIDK

SEQ ID NO: 93749 - protein, 14 aa, Severe acute respiratory syndrome coronavirus 2
LCEKALKYLPIDKC

SEQ ID NO: 93750 - protein, 14 aa, Severe acute respiratory syndrome coronavirus 2
CEKALKYLPIDKCS

SEQ ID NO: 93751 - protein, 14 aa, Severe acute respiratory syndrome coronavirus 2
EKALKYLPIDKCSR

SEQ ID NO: 93752 - protein, 14 aa, Severe acute respiratory syndrome coronavirus 2
KALKYLPIDKCSRI

SEQ ID NO: 93753 - protein, 14 aa, Severe acute respiratory syndrome coronavirus 2
ALKYLPIDKCSRII

SEQ ID NO: 93754 - protein, 14 aa, Severe acute respiratory syndrome coronavirus 2
LKYLPIDKCSRIIP

SEQ ID NO: 93755 - protein, 14 aa, Severe acute respiratory syndrome coronavirus 2
KYLPIDKCSRIIPA

SEQ ID NO: 93756 - protein, 14 aa, Severe acute respiratory syndrome coronavirus 2
LPIDKCSRIIPARA

SEQ ID NO: 93757 - protein, 14 aa, Severe acute respiratory syndrome coronavirus 2
PIDKCSRIIPARAR

SEQ ID NO: 93758 - protein, 14 aa, Severe acute respiratory syndrome coronavirus 2
IDKCSRIIPARARV

SEQ ID NO: 93759 - protein, 14 aa, Severe acute respiratory syndrome coronavirus 2
DKCSRIIPARARVE

SEQ ID NO: 93760 - protein, 14 aa, Severe acute respiratory syndrome coronavirus 2
KCSRIIPARARVEC

SEQ ID NO: 93761 - protein, 14 aa, Severe acute respiratory syndrome coronavirus 2
CSRIIPARARVECF

SEQ ID NO: 93762 - protein, 14 aa, Severe acute respiratory syndrome coronavirus 2
SRIIPARARVECFD

SEQ ID NO: 93763 - protein, 14 aa, Severe acute respiratory syndrome coronavirus 2
RIIPARARVECFDK

SEQ ID NO: 93764 - protein, 14 aa, Severe acute respiratory syndrome coronavirus 2
IIPARARVECFDKF

SEQ ID NO: 93765 - protein, 14 aa, Severe acute respiratory syndrome coronavirus 2
STLEQYVFCTVNAL

SEQ ID NO: 93766 - protein, 14 aa, Severe acute respiratory syndrome coronavirus 2
TLEQYVFCTVNALP

SEQ ID NO: 93767 - protein, 14 aa, Severe acute respiratory syndrome coronavirus 2
HYVYIGDPAQLPAP

SEQ ID NO: 93768 - protein, 14 aa, Severe acute respiratory syndrome coronavirus 2
YVYIGDPAQLPAPR

SEQ ID NO: 93769 - protein, 14 aa, Severe acute respiratory syndrome coronavirus 2
KGTLEPEYFNSVCR

SEQ ID NO: 93770 - protein, 14 aa, Severe acute respiratory syndrome coronavirus 2
SAINRPQIGVVREF

SEQ ID NO: 93771 - protein, 14 aa, Severe acute respiratory syndrome coronavirus 2
AINRPQIGVVREFL

SEQ ID NO: 93772 - protein, 14 aa, Severe acute respiratory syndrome coronavirus 2
INRPQIGVVREFLT

SEQ ID NO: 93773 - protein, 14 aa, Severe acute respiratory syndrome coronavirus 2
NRPQIGVVREFLTR

SEQ ID NO: 93774 - protein, 14 aa, Severe acute respiratory syndrome coronavirus 2
RPQIGVVREFLTRN

SEQ ID NO: 93775 - protein, 14 aa, Severe acute respiratory syndrome coronavirus 2
AWRKAVFISPYNSQ

SEQ ID NO: 93776 - protein, 14 aa, Severe acute respiratory syndrome coronavirus 2
WRKAVFISPYNSQN

SEQ ID NO: 93777 - protein, 14 aa, Severe acute respiratory syndrome coronavirus 2
RKAVFISPYNSQNA

SEQ ID NO: 93778 - protein, 14 aa, Severe acute respiratory syndrome coronavirus 2
KAVFISPYNSQNAV

SEQ ID NO: 93779 - protein, 14 aa, Severe acute respiratory syndrome coronavirus 2
AVFISPYNSQNAVA

SEQ ID NO: 93780 - protein, 14 aa, Severe acute respiratory syndrome coronavirus 2
VFISPYNSQNAVAS

SEQ ID NO: 93781 - protein, 14 aa, Severe acute respiratory syndrome coronavirus 2
TAHSCNVNRFNVAI

SEQ ID NO: 93782 - protein, 14 aa, Severe acute respiratory syndrome coronavirus 2
AHSCNVNRFNVAIT

SEQ ID NO: 93783 - protein, 14 aa, Severe acute respiratory syndrome coronavirus 2
HSCNVNRFNVAITR

SEQ ID NO: 93784 - protein, 14 aa, Severe acute respiratory syndrome coronavirus 2
SDRDLYDKLQFTSL

SEQ ID NO: 93785 - protein, 14 aa, Severe acute respiratory syndrome coronavirus 2
DRDLYDKLQFTSLE

SEQ ID NO: 93786 - protein, 14 aa, Severe acute respiratory syndrome coronavirus 2
RDLYDKLQFTSLEI

SEQ ID NO: 93787 - protein, 14 aa, Severe acute respiratory syndrome coronavirus 2
DLYDKLQFTSLEIP

SEQ ID NO: 93788 - protein, 14 aa, Severe acute respiratory syndrome coronavirus 2
LYDKLQFTSLEIPR

SEQ ID NO: 93789 - protein, 14 aa, Severe acute respiratory syndrome coronavirus 2
YDKLQFTSLEIPRR

SEQ ID NO: 93790 - protein, 14 aa, Severe acute respiratory syndrome coronavirus 2
DKLQFTSLEIPRRN

SEQ ID NO: 93791 - protein, 14 aa, Severe acute respiratory syndrome coronavirus 2
KLQFTSLEIPRRNV

SEQ ID NO: 93792 - protein, 14 aa, Severe acute respiratory syndrome coronavirus 2
SVDTKFKTEGLCVD

SEQ ID NO: 93793 - protein, 14 aa, Severe acute respiratory syndrome coronavirus 2
VDTKFKTEGLCVDI

SEQ ID NO: 93794 - protein, 14 aa, Severe acute respiratory syndrome coronavirus 2
GIPKDMTYRRLISM

SEQ ID NO: 93795 - protein, 14 aa, Severe acute respiratory syndrome coronavirus 2
IPKDMTYRRLISMM

SEQ ID NO: 93796 - protein, 14 aa, Severe acute respiratory syndrome coronavirus 2
PKDMTYRRLISMMG

SEQ ID NO: 93797 - protein, 14 aa, Severe acute respiratory syndrome coronavirus 2
KDMTYRRLISMMGF

SEQ ID NO: 93798 - protein, 14 aa, Severe acute respiratory syndrome coronavirus 2
DMTYRRLISMMGFK

SEQ ID NO: 93799 - protein, 14 aa, Severe acute respiratory syndrome coronavirus 2
MTYRRLISMMGFKM

SEQ ID NO: 93800 - protein, 14 aa, Severe acute respiratory syndrome coronavirus 2
TYRRLISMMGFKMN

SEQ ID NO: 93801 - protein, 14 aa, Severe acute respiratory syndrome coronavirus 2
YRRLISMMGFKMNY

SEQ ID NO: 93802 - protein, 14 aa, Severe acute respiratory syndrome coronavirus 2
RRLISMMGFKMNYQ

SEQ ID NO: 93803 - protein, 14 aa, Severe acute respiratory syndrome coronavirus 2
RLISMMGFKMNYQV

SEQ ID NO: 93804 - protein, 14 aa, Severe acute respiratory syndrome coronavirus 2
LISMMGFKMNYQVN

SEQ ID NO: 93805 - protein, 14 aa, Severe acute respiratory syndrome coronavirus 2
ISMMGFKMNYQVNG

SEQ ID NO: 93806 - protein, 14 aa, Severe acute respiratory syndrome coronavirus 2
SMMGFKMNYQVNGY

SEQ ID NO: 93807 - protein, 14 aa, Severe acute respiratory syndrome coronavirus 2
MMGFKMNYQVNGYP

SEQ ID NO: 93808 - protein, 14 aa, Severe acute respiratory syndrome coronavirus 2
MGFKMNYQVNGYPN

SEQ ID NO: 93809 - protein, 14 aa, Severe acute respiratory syndrome coronavirus 2
GFKMNYQVNGYPNM

SEQ ID NO: 93810 - protein, 14 aa, Severe acute respiratory syndrome coronavirus 2
FKMNYQVNGYPNMF

SEQ ID NO: 93811 - protein, 14 aa, Severe acute respiratory syndrome coronavirus 2
KMNYQVNGYPNMFI

SEQ ID NO: 93812 - protein, 14 aa, Severe acute respiratory syndrome coronavirus 2
MNYQVNGYPNMFIT

SEQ ID NO: 93813 - protein, 14 aa, Severe acute respiratory syndrome coronavirus 2
NYQVNGYPNMFITR

SEQ ID NO: 93814 - protein, 14 aa, Severe acute respiratory syndrome coronavirus 2
YQVNGYPNMFITRE

SEQ ID NO: 93815 - protein, 14 aa, Severe acute respiratory syndrome coronavirus 2
QVNGYPNMFITREE

SEQ ID NO: 93816 - protein, 14 aa, Severe acute respiratory syndrome coronavirus 2
VNGYPNMFITREEA

SEQ ID NO: 93817 - protein, 14 aa, Severe acute respiratory syndrome coronavirus 2
NGYPNMFITREEAI

SEQ ID NO: 93818 - protein, 14 aa, Severe acute respiratory syndrome coronavirus 2
FITREEAIRHVRAW

SEQ ID NO: 93819 - protein, 14 aa, Severe acute respiratory syndrome coronavirus 2
TREEAIRHVRAWIG

SEQ ID NO: 93820 - protein, 14 aa, Severe acute respiratory syndrome coronavirus 2
REEAIRHVRAWIGF

SEQ ID NO: 93821 - protein, 14 aa, Severe acute respiratory syndrome coronavirus 2
EEAIRHVRAWIGFD

SEQ ID NO: 93822 - protein, 14 aa, Severe acute respiratory syndrome coronavirus 2
RHVRAWIGFDVEGC

SEQ ID NO: 93823 - protein, 14 aa, Severe acute respiratory syndrome coronavirus 2
HVRAWIGFDVEGCH

SEQ ID NO: 93824 - protein, 14 aa, Severe acute respiratory syndrome coronavirus 2
VRAWIGFDVEGCHA

SEQ ID NO: 93825 - protein, 14 aa, Severe acute respiratory syndrome coronavirus 2
REAVGTNLPLQLGF

SEQ ID NO: 93826 - protein, 14 aa, Severe acute respiratory syndrome coronavirus 2
PWNVVRLKIVQMLS

SEQ ID NO: 93827 - protein, 14 aa, Severe acute respiratory syndrome coronavirus 2
WNVVRLKIVQMLSD

SEQ ID NO: 93828 - protein, 14 aa, Severe acute respiratory syndrome coronavirus 2
NVVRLKIVQMLSDT

SEQ ID NO: 93829 - protein, 14 aa, Severe acute respiratory syndrome coronavirus 2
VVRLKIVQMLSDTL

SEQ ID NO: 93830 - protein, 14 aa, Severe acute respiratory syndrome coronavirus 2
VRLKIVQMLSDTLK

SEQ ID NO: 93831 - protein, 14 aa, Severe acute respiratory syndrome coronavirus 2
SDRVVFVLWAHGFE

SEQ ID NO: 93832 - protein, 14 aa, Severe acute respiratory syndrome coronavirus 2
DRVVFVLWAHGFEL

SEQ ID NO: 93833 - protein, 14 aa, Severe acute respiratory syndrome coronavirus 2
RVVFVLWAHGFELT

SEQ ID NO: 93834 - protein, 14 aa, Severe acute respiratory syndrome coronavirus 2
VVFVLWAHGFELTS

SEQ ID NO: 93835 - protein, 14 aa, Severe acute respiratory syndrome coronavirus 2
VFVLWAHGFELTSM

SEQ ID NO: 93836 - protein, 14 aa, Severe acute respiratory syndrome coronavirus 2
FVLWAHGFELTSMK

SEQ ID NO: 93837 - protein, 14 aa, Severe acute respiratory syndrome coronavirus 2
VLWAHGFELTSMKY

SEQ ID NO: 93838 - protein, 14 aa, Severe acute respiratory syndrome coronavirus 2
LWAHGFELTSMKYF

SEQ ID NO: 93839 - protein, 14 aa, Severe acute respiratory syndrome coronavirus 2
WAHGFELTSMKYFV

SEQ ID NO: 93840 - protein, 14 aa, Severe acute respiratory syndrome coronavirus 2
AHGFELTSMKYFVK

SEQ ID NO: 93841 - protein, 14 aa, Severe acute respiratory syndrome coronavirus 2
HGFELTSMKYFVKI

SEQ ID NO: 93842 - protein, 14 aa, Severe acute respiratory syndrome coronavirus 2
GFELTSMKYFVKIG

SEQ ID NO: 93843 - protein, 14 aa, Severe acute respiratory syndrome coronavirus 2
FELTSMKYFVKIGP

SEQ ID NO: 93844 - protein, 14 aa, Severe acute respiratory syndrome coronavirus 2
ELTSMKYFVKIGPE

SEQ ID NO: 93845 - protein, 14 aa, Severe acute respiratory syndrome coronavirus 2
LTSMKYFVKIGPER

SEQ ID NO: 93846 - protein, 14 aa, Severe acute respiratory syndrome coronavirus 2
TSMKYFVKIGPERT

SEQ ID NO: 93847 - protein, 14 aa, Severe acute respiratory syndrome coronavirus 2
SMKYFVKIGPERTC

SEQ ID NO: 93848 - protein, 14 aa, Severe acute respiratory syndrome coronavirus 2
MKYFVKIGPERTCC

SEQ ID NO: 93849 - protein, 14 aa, Severe acute respiratory syndrome coronavirus 2
KYFVKIGPERTCCL

SEQ ID NO: 93850 - protein, 14 aa, Severe acute respiratory syndrome coronavirus 2
YFVKIGPERTCCLC

SEQ ID NO: 93851 - protein, 14 aa, Severe acute respiratory syndrome coronavirus 2
FVKIGPERTCCLCD

SEQ ID NO: 93852 - protein, 14 aa, Severe acute respiratory syndrome coronavirus 2
RATCFSTASDTYAC

SEQ ID NO: 93853 - protein, 14 aa, Severe acute respiratory syndrome coronavirus 2
ATCFSTASDTYACW

SEQ ID NO: 93854 - protein, 14 aa, Severe acute respiratory syndrome coronavirus 2
TCFSTASDTYACWH

SEQ ID NO: 93855 - protein, 14 aa, Severe acute respiratory syndrome coronavirus 2
CFSTASDTYACWHH

SEQ ID NO: 93856 - protein, 14 aa, Severe acute respiratory syndrome coronavirus 2
FSTASDTYACWHHS

SEQ ID NO: 93857 - protein, 14 aa, Severe acute respiratory syndrome coronavirus 2
DYVYNPFMIDVQQW

SEQ ID NO: 93858 - protein, 14 aa, Severe acute respiratory syndrome coronavirus 2
DLYCQVHGNAHVAS

SEQ ID NO: 93859 - protein, 14 aa, Severe acute respiratory syndrome coronavirus 2
LYCQVHGNAHVASC

SEQ ID NO: 93860 - protein, 14 aa, Severe acute respiratory syndrome coronavirus 2
YCQVHGNAHVASCD

SEQ ID NO: 93861 - protein, 14 aa, Severe acute respiratory syndrome coronavirus 2
DELKINAACRKVQH

SEQ ID NO: 93862 - protein, 14 aa, Severe acute respiratory syndrome coronavirus 2
LLADKFPVLHDIGN

SEQ ID NO: 93863 - protein, 14 aa, Severe acute respiratory syndrome coronavirus 2
DKFPVLHDIGNPKA

SEQ ID NO: 93864 - protein, 14 aa, Severe acute respiratory syndrome coronavirus 2
KFPVLHDIGNPKAI

SEQ ID NO: 93865 - protein, 14 aa, Severe acute respiratory syndrome coronavirus 2
FPVLHDIGNPKAIK

SEQ ID NO: 93866 - protein, 14 aa, Severe acute respiratory syndrome coronavirus 2
CSDKAYKIEELFYS

SEQ ID NO: 93867 - protein, 14 aa, Severe acute respiratory syndrome coronavirus 2
SDKAYKIEELFYSY

SEQ ID NO: 93868 - protein, 14 aa, Severe acute respiratory syndrome coronavirus 2
DGVCLFWNCNVDRY

SEQ ID NO: 93869 - protein, 14 aa, Severe acute respiratory syndrome coronavirus 2
GVCLFWNCNVDRYP

SEQ ID NO: 93870 - protein, 14 aa, Severe acute respiratory syndrome coronavirus 2
VCLFWNCNVDRYPA

SEQ ID NO: 93871 - protein, 14 aa, Severe acute respiratory syndrome coronavirus 2
CLFWNCNVDRYPAN

SEQ ID NO: 93872 - protein, 14 aa, Severe acute respiratory syndrome coronavirus 2
WNCNVDRYPANSIV

SEQ ID NO: 93873 - protein, 14 aa, Severe acute respiratory syndrome coronavirus 2
CNVDRYPANSIVCR

SEQ ID NO: 93874 - protein, 14 aa, Severe acute respiratory syndrome coronavirus 2
VDRYPANSIVCRFD

SEQ ID NO: 93875 - protein, 14 aa, Severe acute respiratory syndrome coronavirus 2
DRYPANSIVCRFDT

SEQ ID NO: 93876 - protein, 14 aa, Severe acute respiratory syndrome coronavirus 2
RYPANSIVCRFDTR

SEQ ID NO: 93877 - protein, 14 aa, Severe acute respiratory syndrome coronavirus 2
PANSIVCRFDTRVL

SEQ ID NO: 93878 - protein, 14 aa, Severe acute respiratory syndrome coronavirus 2
ANSIVCRFDTRVLS

SEQ ID NO: 93879 - protein, 14 aa, Severe acute respiratory syndrome coronavirus 2
NSIVCRFDTRVLSN

SEQ ID NO: 93880 - protein, 14 aa, Severe acute respiratory syndrome coronavirus 2
SIVCRFDTRVLSNL

SEQ ID NO: 93881 - protein, 14 aa, Severe acute respiratory syndrome coronavirus 2
IVCRFDTRVLSNLN

SEQ ID NO: 93882 - protein, 14 aa, Severe acute respiratory syndrome coronavirus 2
VCRFDTRVLSNLNL

SEQ ID NO: 93883 - protein, 14 aa, Severe acute respiratory syndrome coronavirus 2
DGGSLYVNKHAFHT

SEQ ID NO: 93884 - protein, 14 aa, Severe acute respiratory syndrome coronavirus 2
GGSLYVNKHAFHTP

SEQ ID NO: 93885 - protein, 14 aa, Severe acute respiratory syndrome coronavirus 2
GSLYVNKHAFHTPA

SEQ ID NO: 93886 - protein, 14 aa, Severe acute respiratory syndrome coronavirus 2
DKSAFVNLKQLPFF

SEQ ID NO: 93887 - protein, 14 aa, Severe acute respiratory syndrome coronavirus 2
KSAFVNLKQLPFFY

SEQ ID NO: 93888 - protein, 14 aa, Severe acute respiratory syndrome coronavirus 2
SAFVNLKQLPFFYY

SEQ ID NO: 93889 - protein, 14 aa, Severe acute respiratory syndrome coronavirus 2
AFVNLKQLPFFYYS

SEQ ID NO: 93890 - protein, 14 aa, Severe acute respiratory syndrome coronavirus 2
FVNLKQLPFFYYSD

SEQ ID NO: 93891 - protein, 14 aa, Severe acute respiratory syndrome coronavirus 2
VNLKQLPFFYYSDS

SEQ ID NO: 93892 - protein, 14 aa, Severe acute respiratory syndrome coronavirus 2
NLKQLPFFYYSDSP

SEQ ID NO: 93893 - protein, 14 aa, Severe acute respiratory syndrome coronavirus 2
LKQLPFFYYSDSPC

SEQ ID NO: 93894 - protein, 14 aa, Severe acute respiratory syndrome coronavirus 2
KQLPFFYYSDSPCE

SEQ ID NO: 93895 - protein, 14 aa, Severe acute respiratory syndrome coronavirus 2
QLPFFYYSDSPCES

SEQ ID NO: 93896 - protein, 14 aa, Severe acute respiratory syndrome coronavirus 2
LPFFYYSDSPCESH

SEQ ID NO: 93897 - protein, 14 aa, Severe acute respiratory syndrome coronavirus 2
PFFYYSDSPCESHG

SEQ ID NO: 93898 - protein, 14 aa, Severe acute respiratory syndrome coronavirus 2
FFYYSDSPCESHGK

SEQ ID NO: 93899 - protein, 14 aa, Severe acute respiratory syndrome coronavirus 2
GKQVVSDIDYVPLK

SEQ ID NO: 93900 - protein, 14 aa, Severe acute respiratory syndrome coronavirus 2
KQVVSDIDYVPLKS

SEQ ID NO: 93901 - protein, 14 aa, Severe acute respiratory syndrome coronavirus 2
QVVSDIDYVPLKSA

SEQ ID NO: 93902 - protein, 14 aa, Severe acute respiratory syndrome coronavirus 2
VVSDIDYVPLKSAT

SEQ ID NO: 93903 - protein, 14 aa, Severe acute respiratory syndrome coronavirus 2
VSDIDYVPLKSATC

SEQ ID NO: 93904 - protein, 14 aa, Severe acute respiratory syndrome coronavirus 2
SDIDYVPLKSATCI

SEQ ID NO: 93905 - protein, 14 aa, Severe acute respiratory syndrome coronavirus 2
DIDYVPLKSATCIT

SEQ ID NO: 93906 - protein, 14 aa, Severe acute respiratory syndrome coronavirus 2
IDYVPLKSATCITR

SEQ ID NO: 93907 - protein, 14 aa, Severe acute respiratory syndrome coronavirus 2
DYVPLKSATCITRC

SEQ ID NO: 93908 - protein, 14 aa, Severe acute respiratory syndrome coronavirus 2
YVPLKSATCITRCN

SEQ ID NO: 93909 - protein, 14 aa, Severe acute respiratory syndrome coronavirus 2
ISAGFSLWVYKQFD

SEQ ID NO: 93910 - protein, 14 aa, Severe acute respiratory syndrome coronavirus 2
SAGFSLWVYKQFDT

SEQ ID NO: 93911 - protein, 14 aa, Severe acute respiratory syndrome coronavirus 2
AGFSLWVYKQFDTY

SEQ ID NO: 93912 - protein, 14 aa, Severe acute respiratory syndrome coronavirus 2
GFSLWVYKQFDTYN

SEQ ID NO: 93913 - protein, 14 aa, Severe acute respiratory syndrome coronavirus 2
FSLWVYKQFDTYNL

SEQ ID NO: 93914 - protein, 14 aa, Severe acute respiratory syndrome coronavirus 2
SLWVYKQFDTYNLW

SEQ ID NO: 93915 - protein, 14 aa, Severe acute respiratory syndrome coronavirus 2
LWVYKQFDTYNLWN

SEQ ID NO: 93916 - protein, 14 aa, Severe acute respiratory syndrome coronavirus 2
WVYKQFDTYNLWNT

SEQ ID NO: 93917 - protein, 14 aa, Severe acute respiratory syndrome coronavirus 2
VYKQFDTYNLWNTF

SEQ ID NO: 93918 - protein, 14 aa, Severe acute respiratory syndrome coronavirus 2
YKQFDTYNLWNTFT

SEQ ID NO: 93919 - protein, 14 aa, Severe acute respiratory syndrome coronavirus 2
KQFDTYNLWNTFTR

SEQ ID NO: 93920 - protein, 14 aa, Severe acute respiratory syndrome coronavirus 2
QFDTYNLWNTFTRL

SEQ ID NO: 93921 - protein, 14 aa, Severe acute respiratory syndrome coronavirus 2
FDTYNLWNTFTRLQ

SEQ ID NO: 93922 - protein, 14 aa, Severe acute respiratory syndrome coronavirus 2
KTTLPVNVAFELWA

SEQ ID NO: 93923 - protein, 14 aa, Severe acute respiratory syndrome coronavirus 2
TTLPVNVAFELWAK

SEQ ID NO: 93924 - protein, 14 aa, Severe acute respiratory syndrome coronavirus 2
TLPVNVAFELWAKR

SEQ ID NO: 93925 - protein, 14 aa, Severe acute respiratory syndrome coronavirus 2
LPVNVAFELWAKRN

SEQ ID NO: 93926 - protein, 14 aa, Severe acute respiratory syndrome coronavirus 2
PVNVAFELWAKRNI

SEQ ID NO: 93927 - protein, 14 aa, Severe acute respiratory syndrome coronavirus 2
VNVAFELWAKRNIK

SEQ ID NO: 93928 - protein, 14 aa, Severe acute respiratory syndrome coronavirus 2
NVAFELWAKRNIKP

SEQ ID NO: 93929 - protein, 14 aa, Severe acute respiratory syndrome coronavirus 2
VAFELWAKRNIKPV

SEQ ID NO: 93930 - protein, 14 aa, Severe acute respiratory syndrome coronavirus 2
AFELWAKRNIKPVP

SEQ ID NO: 93931 - protein, 14 aa, Severe acute respiratory syndrome coronavirus 2
FELWAKRNIKPVPE

SEQ ID NO: 93932 - protein, 14 aa, Severe acute respiratory syndrome coronavirus 2
IAANTVIWDYKRDA

SEQ ID NO: 93933 - protein, 14 aa, Severe acute respiratory syndrome coronavirus 2
AANTVIWDYKRDAP

SEQ ID NO: 93934 - protein, 14 aa, Severe acute respiratory syndrome coronavirus 2
ANTVIWDYKRDAPA

SEQ ID NO: 93935 - protein, 14 aa, Severe acute respiratory syndrome coronavirus 2
NTVIWDYKRDAPAH

SEQ ID NO: 93936 - protein, 14 aa, Severe acute respiratory syndrome coronavirus 2
TVIWDYKRDAPAHI

SEQ ID NO: 93937 - protein, 14 aa, Severe acute respiratory syndrome coronavirus 2
VIWDYKRDAPAHIS

SEQ ID NO: 93938 - protein, 14 aa, Severe acute respiratory syndrome coronavirus 2
IWDYKRDAPAHIST

SEQ ID NO: 93939 - protein, 14 aa, Severe acute respiratory syndrome coronavirus 2
WDYKRDAPAHISTI

SEQ ID NO: 93940 - protein, 14 aa, Severe acute respiratory syndrome coronavirus 2
YKRDAPAHISTIGV

SEQ ID NO: 93941 - protein, 14 aa, Severe acute respiratory syndrome coronavirus 2
KRDAPAHISTIGVC

SEQ ID NO: 93942 - protein, 14 aa, Severe acute respiratory syndrome coronavirus 2
RDAPAHISTIGVCS

SEQ ID NO: 93943 - protein, 14 aa, Severe acute respiratory syndrome coronavirus 2
DAPAHISTIGVCSM

SEQ ID NO: 93944 - protein, 14 aa, Severe acute respiratory syndrome coronavirus 2
APAHISTIGVCSMT

SEQ ID NO: 93945 - protein, 14 aa, Severe acute respiratory syndrome coronavirus 2
PAHISTIGVCSMTD

SEQ ID NO: 93946 - protein, 14 aa, Severe acute respiratory syndrome coronavirus 2
AHISTIGVCSMTDI

SEQ ID NO: 93947 - protein, 14 aa, Severe acute respiratory syndrome coronavirus 2
HISTIGVCSMTDIA

SEQ ID NO: 93948 - protein, 14 aa, Severe acute respiratory syndrome coronavirus 2
ISTIGVCSMTDIAK

SEQ ID NO: 93949 - protein, 14 aa, Severe acute respiratory syndrome coronavirus 2
VGPKQASLNGVTLI

SEQ ID NO: 93950 - protein, 14 aa, Severe acute respiratory syndrome coronavirus 2
GPKQASLNGVTLIG

SEQ ID NO: 93951 - protein, 14 aa, Severe acute respiratory syndrome coronavirus 2
PKQASLNGVTLIGE

SEQ ID NO: 93952 - protein, 14 aa, Severe acute respiratory syndrome coronavirus 2
KQASLNGVTLIGEA

SEQ ID NO: 93953 - protein, 14 aa, Severe acute respiratory syndrome coronavirus 2
KTQFNYYKKVDGVV

SEQ ID NO: 93954 - protein, 14 aa, Severe acute respiratory syndrome coronavirus 2
TQFNYYKKVDGVVQ

SEQ ID NO: 93955 - protein, 14 aa, Severe acute respiratory syndrome coronavirus 2
QFNYYKKVDGVVQQ

SEQ ID NO: 93956 - protein, 14 aa, Severe acute respiratory syndrome coronavirus 2
FNYYKKVDGVVQQL

SEQ ID NO: 93957 - protein, 14 aa, Severe acute respiratory syndrome coronavirus 2
NYYKKVDGVVQQLP

SEQ ID NO: 93958 - protein, 14 aa, Severe acute respiratory syndrome coronavirus 2
YYKKVDGVVQQLPE

SEQ ID NO: 93959 - protein, 14 aa, Severe acute respiratory syndrome coronavirus 2
QQLPETYFTQSRNL

SEQ ID NO: 93960 - protein, 14 aa, Severe acute respiratory syndrome coronavirus 2
QLPETYFTQSRNLQ

SEQ ID NO: 93961 - protein, 14 aa, Severe acute respiratory syndrome coronavirus 2
LPETYFTQSRNLQE

SEQ ID NO: 93962 - protein, 14 aa, Severe acute respiratory syndrome coronavirus 2
PETYFTQSRNLQEF

SEQ ID NO: 93963 - protein, 14 aa, Severe acute respiratory syndrome coronavirus 2
ETYFTQSRNLQEFK

SEQ ID NO: 93964 - protein, 14 aa, Severe acute respiratory syndrome coronavirus 2
TYFTQSRNLQEFKP

SEQ ID NO: 93965 - protein, 14 aa, Severe acute respiratory syndrome coronavirus 2
EFIERYKLEGYAFE

SEQ ID NO: 93966 - protein, 14 aa, Severe acute respiratory syndrome coronavirus 2
FSHSQLGGLHLLIG

SEQ ID NO: 93967 - protein, 14 aa, Severe acute respiratory syndrome coronavirus 2
SHSQLGGLHLLIGL

SEQ ID NO: 93968 - protein, 14 aa, Severe acute respiratory syndrome coronavirus 2
HSQLGGLHLLIGLA

SEQ ID NO: 93969 - protein, 14 aa, Severe acute respiratory syndrome coronavirus 2
SQLGGLHLLIGLAK

SEQ ID NO: 93970 - protein, 14 aa, Severe acute respiratory syndrome coronavirus 2
KCVCSVIDLLLDDF

SEQ ID NO: 93971 - protein, 14 aa, Severe acute respiratory syndrome coronavirus 2
VIDLLLDDFVEIIK

SEQ ID NO: 93972 - protein, 14 aa, Severe acute respiratory syndrome coronavirus 2
IDLLLDDFVEIIKS

SEQ ID NO: 93973 - protein, 14 aa, Severe acute respiratory syndrome coronavirus 2
DLLLDDFVEIIKSQ

SEQ ID NO: 93974 - protein, 14 aa, Severe acute respiratory syndrome coronavirus 2
EIIKSQDLSVVSKV

SEQ ID NO: 93975 - protein, 14 aa, Severe acute respiratory syndrome coronavirus 2
IIKSQDLSVVSKVV

SEQ ID NO: 93976 - protein, 14 aa, Severe acute respiratory syndrome coronavirus 2
IKSQDLSVVSKVVK

SEQ ID NO: 93977 - protein, 14 aa, Severe acute respiratory syndrome coronavirus 2
TIDYTEISFMLWCK

SEQ ID NO: 93978 - protein, 14 aa, Severe acute respiratory syndrome coronavirus 2
IDYTEISFMLWCKD

SEQ ID NO: 93979 - protein, 14 aa, Severe acute respiratory syndrome coronavirus 2
DYTEISFMLWCKDG

SEQ ID NO: 93980 - protein, 14 aa, Severe acute respiratory syndrome coronavirus 2
SSQAWQPGVAMPNL

SEQ ID NO: 93981 - protein, 14 aa, Severe acute respiratory syndrome coronavirus 2
SQAWQPGVAMPNLY

SEQ ID NO: 93982 - protein, 14 aa, Severe acute respiratory syndrome coronavirus 2
QAWQPGVAMPNLYK

SEQ ID NO: 93983 - protein, 14 aa, Severe acute respiratory syndrome coronavirus 2
LPKGIMMNVAKYTQ

SEQ ID NO: 93984 - protein, 14 aa, Severe acute respiratory syndrome coronavirus 2
PKGIMMNVAKYTQL

SEQ ID NO: 93985 - protein, 14 aa, Severe acute respiratory syndrome coronavirus 2
KGIMMNVAKYTQLC

SEQ ID NO: 93986 - protein, 14 aa, Severe acute respiratory syndrome coronavirus 2
GIMMNVAKYTQLCQ

SEQ ID NO: 93987 - protein, 14 aa, Severe acute respiratory syndrome coronavirus 2
IMMNVAKYTQLCQY

SEQ ID NO: 93988 - protein, 14 aa, Severe acute respiratory syndrome coronavirus 2
MMNVAKYTQLCQYL

SEQ ID NO: 93989 - protein, 14 aa, Severe acute respiratory syndrome coronavirus 2
MNVAKYTQLCQYLN

SEQ ID NO: 93990 - protein, 14 aa, Severe acute respiratory syndrome coronavirus 2
VAKYTQLCQYLNTL

SEQ ID NO: 93991 - protein, 14 aa, Severe acute respiratory syndrome coronavirus 2
AKYTQLCQYLNTLT

SEQ ID NO: 93992 - protein, 14 aa, Severe acute respiratory syndrome coronavirus 2
KYTQLCQYLNTLTL

SEQ ID NO: 93993 - protein, 14 aa, Severe acute respiratory syndrome coronavirus 2
YTQLCQYLNTLTLA

SEQ ID NO: 93994 - protein, 14 aa, Severe acute respiratory syndrome coronavirus 2
TQLCQYLNTLTLAV

SEQ ID NO: 93995 - protein, 14 aa, Severe acute respiratory syndrome coronavirus 2
QLCQYLNTLTLAVP

SEQ ID NO: 93996 - protein, 14 aa, Severe acute respiratory syndrome coronavirus 2
LCQYLNTLTLAVPY

SEQ ID NO: 93997 - protein, 14 aa, Severe acute respiratory syndrome coronavirus 2
CQYLNTLTLAVPYN

SEQ ID NO: 93998 - protein, 14 aa, Severe acute respiratory syndrome coronavirus 2
LTLAVPYNMRVIHF

SEQ ID NO: 93999 - protein, 14 aa, Severe acute respiratory syndrome coronavirus 2
TLAVPYNMRVIHFG

SEQ ID NO: 94000 - protein, 14 aa, Severe acute respiratory syndrome coronavirus 2
LAVPYNMRVIHFGA

SEQ ID NO: 94001 - protein, 14 aa, Severe acute respiratory syndrome coronavirus 2
VPYNMRVIHFGAGS

SEQ ID NO: 94002 - protein, 14 aa, Severe acute respiratory syndrome coronavirus 2
VAPGTAVLRQWLPT

SEQ ID NO: 94003 - protein, 14 aa, Severe acute respiratory syndrome coronavirus 2
GTAVLRQWLPTGTL

SEQ ID NO: 94004 - protein, 14 aa, Severe acute respiratory syndrome coronavirus 2
TAVLRQWLPTGTLL

SEQ ID NO: 94005 - protein, 14 aa, Severe acute respiratory syndrome coronavirus 2
AVLRQWLPTGTLLV

SEQ ID NO: 94006 - protein, 14 aa, Severe acute respiratory syndrome coronavirus 2
VLRQWLPTGTLLVD

SEQ ID NO: 94007 - protein, 14 aa, Severe acute respiratory syndrome coronavirus 2
LRQWLPTGTLLVDS

SEQ ID NO: 94008 - protein, 14 aa, Severe acute respiratory syndrome coronavirus 2
RQWLPTGTLLVDSD

SEQ ID NO: 94009 - protein, 14 aa, Severe acute respiratory syndrome coronavirus 2
QWLPTGTLLVDSDL

SEQ ID NO: 94010 - protein, 14 aa, Severe acute respiratory syndrome coronavirus 2
TGTLLVDSDLNDFV

SEQ ID NO: 94011 - protein, 14 aa, Severe acute respiratory syndrome coronavirus 2
GTLLVDSDLNDFVS

SEQ ID NO: 94012 - protein, 14 aa, Severe acute respiratory syndrome coronavirus 2
TLLVDSDLNDFVSD

SEQ ID NO: 94013 - protein, 14 aa, Severe acute respiratory syndrome coronavirus 2
HTANKWDLIISDMY

SEQ ID NO: 94014 - protein, 14 aa, Severe acute respiratory syndrome coronavirus 2
TANKWDLIISDMYD

SEQ ID NO: 94015 - protein, 14 aa, Severe acute respiratory syndrome coronavirus 2
SKEGFFTYICGFIQ

SEQ ID NO: 94016 - protein, 14 aa, Severe acute respiratory syndrome coronavirus 2
KEGFFTYICGFIQQ

SEQ ID NO: 94017 - protein, 14 aa, Severe acute respiratory syndrome coronavirus 2
LALGGSVAIKITEH

SEQ ID NO: 94018 - protein, 14 aa, Severe acute respiratory syndrome coronavirus 2
ALGGSVAIKITEHS

SEQ ID NO: 94019 - protein, 14 aa, Severe acute respiratory syndrome coronavirus 2
LGGSVAIKITEHSW

SEQ ID NO: 94020 - protein, 14 aa, Severe acute respiratory syndrome coronavirus 2
IKITEHSWNADLYK

SEQ ID NO: 94021 - protein, 14 aa, Severe acute respiratory syndrome coronavirus 2
KITEHSWNADLYKL

SEQ ID NO: 94022 - protein, 14 aa, Severe acute respiratory syndrome coronavirus 2
ITEHSWNADLYKLM

SEQ ID NO: 94023 - protein, 14 aa, Severe acute respiratory syndrome coronavirus 2
TEHSWNADLYKLMG

SEQ ID NO: 94024 - protein, 14 aa, Severe acute respiratory syndrome coronavirus 2
EHSWNADLYKLMGH

SEQ ID NO: 94025 - protein, 14 aa, Severe acute respiratory syndrome coronavirus 2
HSWNADLYKLMGHF

SEQ ID NO: 94026 - protein, 14 aa, Severe acute respiratory syndrome coronavirus 2
LMGHFAWWTAFVTN

SEQ ID NO: 94027 - protein, 14 aa, Severe acute respiratory syndrome coronavirus 2
MGHFAWWTAFVTNV

SEQ ID NO: 94028 - protein, 14 aa, Severe acute respiratory syndrome coronavirus 2
LSSYSLFDMSKFPL

SEQ ID NO: 94029 - protein, 14 aa, Severe acute respiratory syndrome coronavirus 2
SSYSLFDMSKFPLK

SEQ ID NO: 94030 - protein, 14 aa, Severe acute respiratory syndrome coronavirus 2
SYSLFDMSKFPLKL

SEQ ID NO: 94031 - protein, 14 aa, Severe acute respiratory syndrome coronavirus 2
YSLFDMSKFPLKLR

SEQ ID NO: 94032 - protein, 14 aa, Severe acute respiratory syndrome coronavirus 2
SLFDMSKFPLKLRG

SEQ ID NO: 94033 - protein, 14 aa, Severe acute respiratory syndrome coronavirus 2
LFDMSKFPLKLRGT

SEQ ID NO: 94034 - protein, 14 aa, Severe acute respiratory syndrome coronavirus 2
FDMSKFPLKLRGTA

SEQ ID NO: 94035 - protein, 14 aa, Severe acute respiratory syndrome coronavirus 2
DMSKFPLKLRGTAV

SEQ ID NO: 94036 - protein, 14 aa, Severe acute respiratory syndrome coronavirus 2
MSKFPLKLRGTAVM

SEQ ID NO: 94037 - protein, 14 aa, Severe acute respiratory syndrome coronavirus 2
SKFPLKLRGTAVMS

SEQ ID NO: 94038 - protein, 14 aa, Severe acute respiratory syndrome coronavirus 2
KFPLKLRGTAVMSL

SEQ ID NO: 94039 - protein, 14 aa, Severe acute respiratory syndrome coronavirus 2
FPLKLRGTAVMSLK

SEQ ID NO: 94040 - protein, 14 aa, Severe acute respiratory syndrome coronavirus 2
PLKLRGTAVMSLKE

SEQ ID NO: 94041 - protein, 14 aa, Severe acute respiratory syndrome coronavirus 2
QINDMILSLLSKGR

SEQ ID NO: 94042 - protein, 14 aa, Severe acute respiratory syndrome coronavirus 2
INDMILSLLSKGRL

SEQ ID NO: 94043 - protein, 14 aa, Severe acute respiratory syndrome coronavirus 2
NDMILSLLSKGRLI

SEQ ID NO: 94044 - protein, 14 aa, Severe acute respiratory syndrome coronavirus 2
DMILSLLSKGRLII

SEQ ID NO: 94045 - protein, 14 aa, Severe acute respiratory syndrome coronavirus 2
MILSLLSKGRLIIR

SEQ ID NO: 94046 - protein, 14 aa, Severe acute respiratory syndrome coronavirus 2
ILSLLSKGRLIIRE

SEQ ID NO: 94047 - protein, 14 aa, Severe acute respiratory syndrome coronavirus 2
LSLLSKGRLIIREN

SEQ ID NO: 94048 - protein, 14 aa, Severe acute respiratory syndrome coronavirus 2
SLLSKGRLIIRENN

SEQ ID NO: 94049 - protein, 14 aa, Severe acute respiratory syndrome coronavirus 2
LLSKGRLIIRENNR

SEQ ID NO: 94050 - protein, 15 aa, Severe acute respiratory syndrome coronavirus 2
DEDDNLIDSYFVVKR

SEQ ID NO: 94051 - protein, 15 aa, Severe acute respiratory syndrome coronavirus 2
EDDNLIDSYFVVKRH

SEQ ID NO: 94052 - protein, 15 aa, Severe acute respiratory syndrome coronavirus 2
DDNLIDSYFVVKRHT

SEQ ID NO: 94053 - protein, 15 aa, Severe acute respiratory syndrome coronavirus 2
DNLIDSYFVVKRHTF

SEQ ID NO: 94054 - protein, 15 aa, Severe acute respiratory syndrome coronavirus 2
NLIDSYFVVKRHTFS

SEQ ID NO: 94055 - protein, 15 aa, Severe acute respiratory syndrome coronavirus 2
LIDSYFVVKRHTFSN

SEQ ID NO: 94056 - protein, 15 aa, Severe acute respiratory syndrome coronavirus 2
IDSYFVVKRHTFSNY

SEQ ID NO: 94057 - protein, 15 aa, Severe acute respiratory syndrome coronavirus 2
DSYFVVKRHTFSNYQ

SEQ ID NO: 94058 - protein, 15 aa, Severe acute respiratory syndrome coronavirus 2
SYFVVKRHTFSNYQH

SEQ ID NO: 94059 - protein, 15 aa, Severe acute respiratory syndrome coronavirus 2
YFVVKRHTFSNYQHE

SEQ ID NO: 94060 - protein, 15 aa, Severe acute respiratory syndrome coronavirus 2
FVVKRHTFSNYQHEE

SEQ ID NO: 94061 - protein, 15 aa, Severe acute respiratory syndrome coronavirus 2
KHDFFKFRIDGDMVP

SEQ ID NO: 94062 - protein, 15 aa, Severe acute respiratory syndrome coronavirus 2
HDFFKFRIDGDMVPH

SEQ ID NO: 94063 - protein, 15 aa, Severe acute respiratory syndrome coronavirus 2
DFFKFRIDGDMVPHI

SEQ ID NO: 94064 - protein, 15 aa, Severe acute respiratory syndrome coronavirus 2
FFKFRIDGDMVPHIS

SEQ ID NO: 94065 - protein, 15 aa, Severe acute respiratory syndrome coronavirus 2
FKFRIDGDMVPHISR

SEQ ID NO: 94066 - protein, 15 aa, Severe acute respiratory syndrome coronavirus 2
KFRIDGDMVPHISRQ

SEQ ID NO: 94067 - protein, 15 aa, Severe acute respiratory syndrome coronavirus 2
FRIDGDMVPHISRQR

SEQ ID NO: 94068 - protein, 15 aa, Severe acute respiratory syndrome coronavirus 2
RIDGDMVPHISRQRL

SEQ ID NO: 94069 - protein, 15 aa, Severe acute respiratory syndrome coronavirus 2
IDGDMVPHISRQRLT

SEQ ID NO: 94070 - protein, 15 aa, Severe acute respiratory syndrome coronavirus 2
DGDMVPHISRQRLTK

SEQ ID NO: 94071 - protein, 15 aa, Severe acute respiratory syndrome coronavirus 2
GDMVPHISRQRLTKY

SEQ ID NO: 94072 - protein, 15 aa, Severe acute respiratory syndrome coronavirus 2
DMVPHISRQRLTKYT

SEQ ID NO: 94073 - protein, 15 aa, Severe acute respiratory syndrome coronavirus 2
MVPHISRQRLTKYTM

SEQ ID NO: 94074 - protein, 15 aa, Severe acute respiratory syndrome coronavirus 2
VPHISRQRLTKYTMA

SEQ ID NO: 94075 - protein, 15 aa, Severe acute respiratory syndrome coronavirus 2
PHISRQRLTKYTMAD

SEQ ID NO: 94076 - protein, 15 aa, Severe acute respiratory syndrome coronavirus 2
HISRQRLTKYTMADL

SEQ ID NO: 94077 - protein, 15 aa, Severe acute respiratory syndrome coronavirus 2
ISRQRLTKYTMADLV

SEQ ID NO: 94078 - protein, 15 aa, Severe acute respiratory syndrome coronavirus 2
SRQRLTKYTMADLVY

SEQ ID NO: 94079 - protein, 15 aa, Severe acute respiratory syndrome coronavirus 2
RQRLTKYTMADLVYA

SEQ ID NO: 94080 - protein, 15 aa, Severe acute respiratory syndrome coronavirus 2
QRLTKYTMADLVYAL

SEQ ID NO: 94081 - protein, 15 aa, Severe acute respiratory syndrome coronavirus 2
RLTKYTMADLVYALR

SEQ ID NO: 94082 - protein, 15 aa, Severe acute respiratory syndrome coronavirus 2
LTKYTMADLVYALRH

SEQ ID NO: 94083 - protein, 15 aa, Severe acute respiratory syndrome coronavirus 2
TKYTMADLVYALRHF

SEQ ID NO: 94084 - protein, 15 aa, Severe acute respiratory syndrome coronavirus 2
KYTMADLVYALRHFD

SEQ ID NO: 94085 - protein, 15 aa, Severe acute respiratory syndrome coronavirus 2
YTMADLVYALRHFDE

SEQ ID NO: 94086 - protein, 15 aa, Severe acute respiratory syndrome coronavirus 2
TMADLVYALRHFDEG

SEQ ID NO: 94087 - protein, 15 aa, Severe acute respiratory syndrome coronavirus 2
MADLVYALRHFDEGN

SEQ ID NO: 94088 - protein, 15 aa, Severe acute respiratory syndrome coronavirus 2
ADLVYALRHFDEGNC

SEQ ID NO: 94089 - protein, 15 aa, Severe acute respiratory syndrome coronavirus 2
DLVYALRHFDEGNCD

SEQ ID NO: 94090 - protein, 15 aa, Severe acute respiratory syndrome coronavirus 2
LKEILVTYNCCDDDY

SEQ ID NO: 94091 - protein, 15 aa, Severe acute respiratory syndrome coronavirus 2
KEILVTYNCCDDDYF

SEQ ID NO: 94092 - protein, 15 aa, Severe acute respiratory syndrome coronavirus 2
EILVTYNCCDDDYFN

SEQ ID NO: 94093 - protein, 15 aa, Severe acute respiratory syndrome coronavirus 2
LLKTVQFCDAMRNAG

SEQ ID NO: 94094 - protein, 15 aa, Severe acute respiratory syndrome coronavirus 2
VQFCDAMRNAGIVGV

SEQ ID NO: 94095 - protein, 15 aa, Severe acute respiratory syndrome coronavirus 2
QFCDAMRNAGIVGVL

SEQ ID NO: 94096 - protein, 15 aa, Severe acute respiratory syndrome coronavirus 2
FCDAMRNAGIVGVLT

SEQ ID NO: 94097 - protein, 15 aa, Severe acute respiratory syndrome coronavirus 2
CDAMRNAGIVGVLTL

SEQ ID NO: 94098 - protein, 15 aa, Severe acute respiratory syndrome coronavirus 2
DAMRNAGIVGVLTLD

SEQ ID NO: 94099 - protein, 15 aa, Severe acute respiratory syndrome coronavirus 2
AMRNAGIVGVLTLDN

SEQ ID NO: 94100 - protein, 15 aa, Severe acute respiratory syndrome coronavirus 2
MRNAGIVGVLTLDNQ

SEQ ID NO: 94101 - protein, 15 aa, Severe acute respiratory syndrome coronavirus 2
RNAGIVGVLTLDNQD

SEQ ID NO: 94102 - protein, 15 aa, Severe acute respiratory syndrome coronavirus 2
NAGIVGVLTLDNQDL

SEQ ID NO: 94103 - protein, 15 aa, Severe acute respiratory syndrome coronavirus 2
AGIVGVLTLDNQDLN

SEQ ID NO: 94104 - protein, 15 aa, Severe acute respiratory syndrome coronavirus 2
GIVGVLTLDNQDLNG

SEQ ID NO: 94105 - protein, 15 aa, Severe acute respiratory syndrome coronavirus 2
IVGVLTLDNQDLNGN

SEQ ID NO: 94106 - protein, 15 aa, Severe acute respiratory syndrome coronavirus 2
VGVLTLDNQDLNGNW

SEQ ID NO: 94107 - protein, 15 aa, Severe acute respiratory syndrome coronavirus 2
SGVPVVDSYYSLLMP

SEQ ID NO: 94108 - protein, 15 aa, Severe acute respiratory syndrome coronavirus 2
GVPVVDSYYSLLMPI

SEQ ID NO: 94109 - protein, 15 aa, Severe acute respiratory syndrome coronavirus 2
VPVVDSYYSLLMPIL

SEQ ID NO: 94110 - protein, 15 aa, Severe acute respiratory syndrome coronavirus 2
PVVDSYYSLLMPILT

SEQ ID NO: 94111 - protein, 15 aa, Severe acute respiratory syndrome coronavirus 2
VVDSYYSLLMPILTL

SEQ ID NO: 94112 - protein, 15 aa, Severe acute respiratory syndrome coronavirus 2
VDSYYSLLMPILTLT

SEQ ID NO: 94113 - protein, 15 aa, Severe acute respiratory syndrome coronavirus 2
DSYYSLLMPILTLTR

SEQ ID NO: 94114 - protein, 15 aa, Severe acute respiratory syndrome coronavirus 2
ESHVDTDLTKPYIKW

SEQ ID NO: 94115 - protein, 15 aa, Severe acute respiratory syndrome coronavirus 2
SHVDTDLTKPYIKWD

SEQ ID NO: 94116 - protein, 15 aa, Severe acute respiratory syndrome coronavirus 2
HVDTDLTKPYIKWDL

SEQ ID NO: 94117 - protein, 15 aa, Severe acute respiratory syndrome coronavirus 2
DTDLTKPYIKWDLLK

SEQ ID NO: 94118 - protein, 15 aa, Severe acute respiratory syndrome coronavirus 2
TDLTKPYIKWDLLKY

SEQ ID NO: 94119 - protein, 15 aa, Severe acute respiratory syndrome coronavirus 2
DLTKPYIKWDLLKYD

SEQ ID NO: 94120 - protein, 15 aa, Severe acute respiratory syndrome coronavirus 2
LTKPYIKWDLLKYDF

SEQ ID NO: 94121 - protein, 15 aa, Severe acute respiratory syndrome coronavirus 2
TKPYIKWDLLKYDFT

SEQ ID NO: 94122 - protein, 15 aa, Severe acute respiratory syndrome coronavirus 2
KPYIKWDLLKYDFTE

SEQ ID NO: 94123 - protein, 15 aa, Severe acute respiratory syndrome coronavirus 2
DRCILHCANFNVLFS

SEQ ID NO: 94124 - protein, 15 aa, Severe acute respiratory syndrome coronavirus 2
RCILHCANFNVLFST

SEQ ID NO: 94125 - protein, 15 aa, Severe acute respiratory syndrome coronavirus 2
CILHCANFNVLFSTV

SEQ ID NO: 94126 - protein, 15 aa, Severe acute respiratory syndrome coronavirus 2
ILHCANFNVLFSTVF

SEQ ID NO: 94127 - protein, 15 aa, Severe acute respiratory syndrome coronavirus 2
LHCANFNVLFSTVFP

SEQ ID NO: 94128 - protein, 15 aa, Severe acute respiratory syndrome coronavirus 2
VRKIFVDGVPFVVST

SEQ ID NO: 94129 - protein, 15 aa, Severe acute respiratory syndrome coronavirus 2
RKIFVDGVPFVVSTG

SEQ ID NO: 94130 - protein, 15 aa, Severe acute respiratory syndrome coronavirus 2
KIFVDGVPFVVSTGY

SEQ ID NO: 94131 - protein, 15 aa, Severe acute respiratory syndrome coronavirus 2
IFVDGVPFVVSTGYH

SEQ ID NO: 94132 - protein, 15 aa, Severe acute respiratory syndrome coronavirus 2
FVDGVPFVVSTGYHF

SEQ ID NO: 94133 - protein, 15 aa, Severe acute respiratory syndrome coronavirus 2
VDGVPFVVSTGYHFR

SEQ ID NO: 94134 - protein, 15 aa, Severe acute respiratory syndrome coronavirus 2
DGVPFVVSTGYHFRE

SEQ ID NO: 94135 - protein, 15 aa, Severe acute respiratory syndrome coronavirus 2
GVPFVVSTGYHFREL

SEQ ID NO: 94136 - protein, 15 aa, Severe acute respiratory syndrome coronavirus 2
VPFVVSTGYHFRELG

SEQ ID NO: 94137 - protein, 15 aa, Severe acute respiratory syndrome coronavirus 2
PFVVSTGYHFRELGV

SEQ ID NO: 94138 - protein, 15 aa, Severe acute respiratory syndrome coronavirus 2
FVVSTGYHFRELGVV

SEQ ID NO: 94139 - protein, 15 aa, Severe acute respiratory syndrome coronavirus 2
VVSTGYHFRELGVVH

SEQ ID NO: 94140 - protein, 15 aa, Severe acute respiratory syndrome coronavirus 2
VSTGYHFRELGVVHN

SEQ ID NO: 94141 - protein, 15 aa, Severe acute respiratory syndrome coronavirus 2
HNQDVNLHSSRLSFK

SEQ ID NO: 94142 - protein, 15 aa, Severe acute respiratory syndrome coronavirus 2
NQDVNLHSSRLSFKE

SEQ ID NO: 94143 - protein, 15 aa, Severe acute respiratory syndrome coronavirus 2
QDVNLHSSRLSFKEL

SEQ ID NO: 94144 - protein, 15 aa, Severe acute respiratory syndrome coronavirus 2
DVNLHSSRLSFKELL

SEQ ID NO: 94145 - protein, 15 aa, Severe acute respiratory syndrome coronavirus 2
VNLHSSRLSFKELLV

SEQ ID NO: 94146 - protein, 15 aa, Severe acute respiratory syndrome coronavirus 2
NLHSSRLSFKELLVY

SEQ ID NO: 94147 - protein, 15 aa, Severe acute respiratory syndrome coronavirus 2
LHSSRLSFKELLVYA

SEQ ID NO: 94148 - protein, 15 aa, Severe acute respiratory syndrome coronavirus 2
HSSRLSFKELLVYAA

SEQ ID NO: 94149 - protein, 15 aa, Severe acute respiratory syndrome coronavirus 2
SSRLSFKELLVYAAD

SEQ ID NO: 94150 - protein, 15 aa, Severe acute respiratory syndrome coronavirus 2
SRLSFKELLVYAADP

SEQ ID NO: 94151 - protein, 15 aa, Severe acute respiratory syndrome coronavirus 2
RLSFKELLVYAADPA

SEQ ID NO: 94152 - protein, 15 aa, Severe acute respiratory syndrome coronavirus 2
AFQTVKPGNFNKDFY

SEQ ID NO: 94153 - protein, 15 aa, Severe acute respiratory syndrome coronavirus 2
VKPGNFNKDFYDFAV

SEQ ID NO: 94154 - protein, 15 aa, Severe acute respiratory syndrome coronavirus 2
KPGNFNKDFYDFAVS

SEQ ID NO: 94155 - protein, 15 aa, Severe acute respiratory syndrome coronavirus 2
ISDYDYYRYNLPTMC

SEQ ID NO: 94156 - protein, 15 aa, Severe acute respiratory syndrome coronavirus 2
SDYDYYRYNLPTMCD

SEQ ID NO: 94157 - protein, 15 aa, Severe acute respiratory syndrome coronavirus 2
DYDYYRYNLPTMCDI

SEQ ID NO: 94158 - protein, 15 aa, Severe acute respiratory syndrome coronavirus 2
YDYYRYNLPTMCDIR

SEQ ID NO: 94159 - protein, 15 aa, Severe acute respiratory syndrome coronavirus 2
DYYRYNLPTMCDIRQ

SEQ ID NO: 94160 - protein, 15 aa, Severe acute respiratory syndrome coronavirus 2
YYRYNLPTMCDIRQL

SEQ ID NO: 94161 - protein, 15 aa, Severe acute respiratory syndrome coronavirus 2
YRYNLPTMCDIRQLL

SEQ ID NO: 94162 - protein, 15 aa, Severe acute respiratory syndrome coronavirus 2
RYNLPTMCDIRQLLF

SEQ ID NO: 94163 - protein, 15 aa, Severe acute respiratory syndrome coronavirus 2
QVIVNNLDKSAGFPF

SEQ ID NO: 94164 - protein, 15 aa, Severe acute respiratory syndrome coronavirus 2
VIVNNLDKSAGFPFN

SEQ ID NO: 94165 - protein, 15 aa, Severe acute respiratory syndrome coronavirus 2
IVNNLDKSAGFPFNK

SEQ ID NO: 94166 - protein, 15 aa, Severe acute respiratory syndrome coronavirus 2
VNNLDKSAGFPFNKW

SEQ ID NO: 94167 - protein, 15 aa, Severe acute respiratory syndrome coronavirus 2
NNLDKSAGFPFNKWG

SEQ ID NO: 94168 - protein, 15 aa, Severe acute respiratory syndrome coronavirus 2
NLDKSAGFPFNKWGK

SEQ ID NO: 94169 - protein, 15 aa, Severe acute respiratory syndrome coronavirus 2
LDKSAGFPFNKWGKA

SEQ ID NO: 94170 - protein, 15 aa, Severe acute respiratory syndrome coronavirus 2
DKSAGFPFNKWGKAR

SEQ ID NO: 94171 - protein, 15 aa, Severe acute respiratory syndrome coronavirus 2
YTKRNVIPTITQMNL

SEQ ID NO: 94172 - protein, 15 aa, Severe acute respiratory syndrome coronavirus 2
TKRNVIPTITQMNLK

SEQ ID NO: 94173 - protein, 15 aa, Severe acute respiratory syndrome coronavirus 2
KRNVIPTITQMNLKY

SEQ ID NO: 94174 - protein, 15 aa, Severe acute respiratory syndrome coronavirus 2
RNVIPTITQMNLKYA

SEQ ID NO: 94175 - protein, 15 aa, Severe acute respiratory syndrome coronavirus 2
NVIPTITQMNLKYAI

SEQ ID NO: 94176 - protein, 15 aa, Severe acute respiratory syndrome coronavirus 2
VIPTITQMNLKYAIS

SEQ ID NO: 94177 - protein, 15 aa, Severe acute respiratory syndrome coronavirus 2
IPTITQMNLKYAISA

SEQ ID NO: 94178 - protein, 15 aa, Severe acute respiratory syndrome coronavirus 2
PTITQMNLKYAISAK

SEQ ID NO: 94179 - protein, 15 aa, Severe acute respiratory syndrome coronavirus 2
TITQMNLKYAISAKN

SEQ ID NO: 94180 - protein, 15 aa, Severe acute respiratory syndrome coronavirus 2
ITQMNLKYAISAKNR

SEQ ID NO: 94181 - protein, 15 aa, Severe acute respiratory syndrome coronavirus 2
TQMNLKYAISAKNRA

SEQ ID NO: 94182 - protein, 15 aa, Severe acute respiratory syndrome coronavirus 2
QMNLKYAISAKNRAR

SEQ ID NO: 94183 - protein, 15 aa, Severe acute respiratory syndrome coronavirus 2
MNLKYAISAKNRART

SEQ ID NO: 94184 - protein, 15 aa, Severe acute respiratory syndrome coronavirus 2
NLKYAISAKNRARTV

SEQ ID NO: 94185 - protein, 15 aa, Severe acute respiratory syndrome coronavirus 2
LKYAISAKNRARTVA

SEQ ID NO: 94186 - protein, 15 aa, Severe acute respiratory syndrome coronavirus 2
KYAISAKNRARTVAG

SEQ ID NO: 94187 - protein, 15 aa, Severe acute respiratory syndrome coronavirus 2
YAISAKNRARTVAGV

SEQ ID NO: 94188 - protein, 15 aa, Severe acute respiratory syndrome coronavirus 2
AISAKNRARTVAGVS

SEQ ID NO: 94189 - protein, 15 aa, Severe acute respiratory syndrome coronavirus 2
ISAKNRARTVAGVSI

SEQ ID NO: 94190 - protein, 15 aa, Severe acute respiratory syndrome coronavirus 2
SAKNRARTVAGVSIC

SEQ ID NO: 94191 - protein, 15 aa, Severe acute respiratory syndrome coronavirus 2
AKNRARTVAGVSICS

SEQ ID NO: 94192 - protein, 15 aa, Severe acute respiratory syndrome coronavirus 2
KNRARTVAGVSICST

SEQ ID NO: 94193 - protein, 15 aa, Severe acute respiratory syndrome coronavirus 2
NRARTVAGVSICSTM

SEQ ID NO: 94194 - protein, 15 aa, Severe acute respiratory syndrome coronavirus 2
RARTVAGVSICSTMT

SEQ ID NO: 94195 - protein, 15 aa, Severe acute respiratory syndrome coronavirus 2
ARTVAGVSICSTMTN

SEQ ID NO: 94196 - protein, 15 aa, Severe acute respiratory syndrome coronavirus 2
RTVAGVSICSTMTNR

SEQ ID NO: 94197 - protein, 15 aa, Severe acute respiratory syndrome coronavirus 2
TVAGVSICSTMTNRQ

SEQ ID NO: 94198 - protein, 15 aa, Severe acute respiratory syndrome coronavirus 2
VAGVSICSTMTNRQF

SEQ ID NO: 94199 - protein, 15 aa, Severe acute respiratory syndrome coronavirus 2
AGVSICSTMTNRQFH

SEQ ID NO: 94200 - protein, 15 aa, Severe acute respiratory syndrome coronavirus 2
GVSICSTMTNRQFHQ

SEQ ID NO: 94201 - protein, 15 aa, Severe acute respiratory syndrome coronavirus 2
VSICSTMTNRQFHQK

SEQ ID NO: 94202 - protein, 15 aa, Severe acute respiratory syndrome coronavirus 2
SICSTMTNRQFHQKL

SEQ ID NO: 94203 - protein, 15 aa, Severe acute respiratory syndrome coronavirus 2
ICSTMTNRQFHQKLL

SEQ ID NO: 94204 - protein, 15 aa, Severe acute respiratory syndrome coronavirus 2
CSTMTNRQFHQKLLK

SEQ ID NO: 94205 - protein, 15 aa, Severe acute respiratory syndrome coronavirus 2
STMTNRQFHQKLLKS

SEQ ID NO: 94206 - protein, 15 aa, Severe acute respiratory syndrome coronavirus 2
TMTNRQFHQKLLKSI

SEQ ID NO: 94207 - protein, 15 aa, Severe acute respiratory syndrome coronavirus 2
MTNRQFHQKLLKSIA

SEQ ID NO: 94208 - protein, 15 aa, Severe acute respiratory syndrome coronavirus 2
TNRQFHQKLLKSIAA

SEQ ID NO: 94209 - protein, 15 aa, Severe acute respiratory syndrome coronavirus 2
NRQFHQKLLKSIAAT

SEQ ID NO: 94210 - protein, 15 aa, Severe acute respiratory syndrome coronavirus 2
RQFHQKLLKSIAATR

SEQ ID NO: 94211 - protein, 15 aa, Severe acute respiratory syndrome coronavirus 2
QFHQKLLKSIAATRG

SEQ ID NO: 94212 - protein, 15 aa, Severe acute respiratory syndrome coronavirus 2
FHQKLLKSIAATRGA

SEQ ID NO: 94213 - protein, 15 aa, Severe acute respiratory syndrome coronavirus 2
HQKLLKSIAATRGAT

SEQ ID NO: 94214 - protein, 15 aa, Severe acute respiratory syndrome coronavirus 2
IGTSKFYGGWHNMLK

SEQ ID NO: 94215 - protein, 15 aa, Severe acute respiratory syndrome coronavirus 2
GTSKFYGGWHNMLKT

SEQ ID NO: 94216 - protein, 15 aa, Severe acute respiratory syndrome coronavirus 2
TSKFYGGWHNMLKTV

SEQ ID NO: 94217 - protein, 15 aa, Severe acute respiratory syndrome coronavirus 2
SKFYGGWHNMLKTVY

SEQ ID NO: 94218 - protein, 15 aa, Severe acute respiratory syndrome coronavirus 2
CGGSLYVKPGGTSSG

SEQ ID NO: 94219 - protein, 15 aa, Severe acute respiratory syndrome coronavirus 2
GGSLYVKPGGTSSGD

SEQ ID NO: 94220 - protein, 15 aa, Severe acute respiratory syndrome coronavirus 2
GSLYVKPGGTSSGDA

SEQ ID NO: 94221 - protein, 15 aa, Severe acute respiratory syndrome coronavirus 2
SLYVKPGGTSSGDAT

SEQ ID NO: 94222 - protein, 15 aa, Severe acute respiratory syndrome coronavirus 2
LYVKPGGTSSGDATT

SEQ ID NO: 94223 - protein, 15 aa, Severe acute respiratory syndrome coronavirus 2
YVKPGGTSSGDATTA

SEQ ID NO: 94224 - protein, 15 aa, Severe acute respiratory syndrome coronavirus 2
VKPGGTSSGDATTAY

SEQ ID NO: 94225 - protein, 15 aa, Severe acute respiratory syndrome coronavirus 2
KPGGTSSGDATTAYA

SEQ ID NO: 94226 - protein, 15 aa, Severe acute respiratory syndrome coronavirus 2
PGGTSSGDATTAYAN

SEQ ID NO: 94227 - protein, 15 aa, Severe acute respiratory syndrome coronavirus 2
GGTSSGDATTAYANS

SEQ ID NO: 94228 - protein, 15 aa, Severe acute respiratory syndrome coronavirus 2
GTSSGDATTAYANSV

SEQ ID NO: 94229 - protein, 15 aa, Severe acute respiratory syndrome coronavirus 2
TSSGDATTAYANSVF

SEQ ID NO: 94230 - protein, 15 aa, Severe acute respiratory syndrome coronavirus 2
SSGDATTAYANSVFN

SEQ ID NO: 94231 - protein, 15 aa, Severe acute respiratory syndrome coronavirus 2
SGDATTAYANSVFNI

SEQ ID NO: 94232 - protein, 15 aa, Severe acute respiratory syndrome coronavirus 2
GDATTAYANSVFNIC

SEQ ID NO: 94233 - protein, 15 aa, Severe acute respiratory syndrome coronavirus 2
DATTAYANSVFNICQ

SEQ ID NO: 94234 - protein, 15 aa, Severe acute respiratory syndrome coronavirus 2
ATTAYANSVFNICQA

SEQ ID NO: 94235 - protein, 15 aa, Severe acute respiratory syndrome coronavirus 2
TTAYANSVFNICQAV

SEQ ID NO: 94236 - protein, 15 aa, Severe acute respiratory syndrome coronavirus 2
TAYANSVFNICQAVT

SEQ ID NO: 94237 - protein, 15 aa, Severe acute respiratory syndrome coronavirus 2
AYANSVFNICQAVTA

SEQ ID NO: 94238 - protein, 15 aa, Severe acute respiratory syndrome coronavirus 2
YANSVFNICQAVTAN

SEQ ID NO: 94239 - protein, 15 aa, Severe acute respiratory syndrome coronavirus 2
ANSVFNICQAVTANV

SEQ ID NO: 94240 - protein, 15 aa, Severe acute respiratory syndrome coronavirus 2
NSVFNICQAVTANVN

SEQ ID NO: 94241 - protein, 15 aa, Severe acute respiratory syndrome coronavirus 2
SVFNICQAVTANVNA

SEQ ID NO: 94242 - protein, 15 aa, Severe acute respiratory syndrome coronavirus 2
VFNICQAVTANVNAL

SEQ ID NO: 94243 - protein, 15 aa, Severe acute respiratory syndrome coronavirus 2
FNICQAVTANVNALL

SEQ ID NO: 94244 - protein, 15 aa, Severe acute respiratory syndrome coronavirus 2
NICQAVTANVNALLS

SEQ ID NO: 94245 - protein, 15 aa, Severe acute respiratory syndrome coronavirus 2
ICQAVTANVNALLST

SEQ ID NO: 94246 - protein, 15 aa, Severe acute respiratory syndrome coronavirus 2
CQAVTANVNALLSTD

SEQ ID NO: 94247 - protein, 15 aa, Severe acute respiratory syndrome coronavirus 2
QAVTANVNALLSTDG

SEQ ID NO: 94248 - protein, 15 aa, Severe acute respiratory syndrome coronavirus 2
AVTANVNALLSTDGN

SEQ ID NO: 94249 - protein, 15 aa, Severe acute respiratory syndrome coronavirus 2
VTANVNALLSTDGNK

SEQ ID NO: 94250 - protein, 15 aa, Severe acute respiratory syndrome coronavirus 2
TANVNALLSTDGNKI

SEQ ID NO: 94251 - protein, 15 aa, Severe acute respiratory syndrome coronavirus 2
ANVNALLSTDGNKIA

SEQ ID NO: 94252 - protein, 15 aa, Severe acute respiratory syndrome coronavirus 2
NVNALLSTDGNKIAD

SEQ ID NO: 94253 - protein, 15 aa, Severe acute respiratory syndrome coronavirus 2
VNALLSTDGNKIADK

SEQ ID NO: 94254 - protein, 15 aa, Severe acute respiratory syndrome coronavirus 2
NALLSTDGNKIADKY

SEQ ID NO: 94255 - protein, 15 aa, Severe acute respiratory syndrome coronavirus 2
ALLSTDGNKIADKYV

SEQ ID NO: 94256 - protein, 15 aa, Severe acute respiratory syndrome coronavirus 2
TDGNKIADKYVRNLQ

SEQ ID NO: 94257 - protein, 15 aa, Severe acute respiratory syndrome coronavirus 2
DGNKIADKYVRNLQH

SEQ ID NO: 94258 - protein, 15 aa, Severe acute respiratory syndrome coronavirus 2
GNKIADKYVRNLQHR

SEQ ID NO: 94259 - protein, 15 aa, Severe acute respiratory syndrome coronavirus 2
NKIADKYVRNLQHRL

SEQ ID NO: 94260 - protein, 15 aa, Severe acute respiratory syndrome coronavirus 2
KIADKYVRNLQHRLY

SEQ ID NO: 94261 - protein, 15 aa, Severe acute respiratory syndrome coronavirus 2
IADKYVRNLQHRLYE

SEQ ID NO: 94262 - protein, 15 aa, Severe acute respiratory syndrome coronavirus 2
ADKYVRNLQHRLYEC

SEQ ID NO: 94263 - protein, 15 aa, Severe acute respiratory syndrome coronavirus 2
DKYVRNLQHRLYECL

SEQ ID NO: 94264 - protein, 15 aa, Severe acute respiratory syndrome coronavirus 2
KYVRNLQHRLYECLY

SEQ ID NO: 94265 - protein, 15 aa, Severe acute respiratory syndrome coronavirus 2
YVRNLQHRLYECLYR

SEQ ID NO: 94266 - protein, 15 aa, Severe acute respiratory syndrome coronavirus 2
FYAYLRKHFSMMILS

SEQ ID NO: 94267 - protein, 15 aa, Severe acute respiratory syndrome coronavirus 2
YAYLRKHFSMMILSD

SEQ ID NO: 94268 - protein, 15 aa, Severe acute respiratory syndrome coronavirus 2
AYLRKHFSMMILSDD

SEQ ID NO: 94269 - protein, 15 aa, Severe acute respiratory syndrome coronavirus 2
YLRKHFSMMILSDDA

SEQ ID NO: 94270 - protein, 15 aa, Severe acute respiratory syndrome coronavirus 2
LRKHFSMMILSDDAV

SEQ ID NO: 94271 - protein, 15 aa, Severe acute respiratory syndrome coronavirus 2
RKHFSMMILSDDAVV

SEQ ID NO: 94272 - protein, 15 aa, Severe acute respiratory syndrome coronavirus 2
KHFSMMILSDDAVVC

SEQ ID NO: 94273 - protein, 15 aa, Severe acute respiratory syndrome coronavirus 2
HFSMMILSDDAVVCF

SEQ ID NO: 94274 - protein, 15 aa, Severe acute respiratory syndrome coronavirus 2
LVASIKNFKSVLYYQ

SEQ ID NO: 94275 - protein, 15 aa, Severe acute respiratory syndrome coronavirus 2
VASIKNFKSVLYYQN

SEQ ID NO: 94276 - protein, 15 aa, Severe acute respiratory syndrome coronavirus 2
ASIKNFKSVLYYQNN

SEQ ID NO: 94277 - protein, 15 aa, Severe acute respiratory syndrome coronavirus 2
SIKNFKSVLYYQNNV

SEQ ID NO: 94278 - protein, 15 aa, Severe acute respiratory syndrome coronavirus 2
IKNFKSVLYYQNNVF

SEQ ID NO: 94279 - protein, 15 aa, Severe acute respiratory syndrome coronavirus 2
KNFKSVLYYQNNVFM

SEQ ID NO: 94280 - protein, 15 aa, Severe acute respiratory syndrome coronavirus 2
NFKSVLYYQNNVFMS

SEQ ID NO: 94281 - protein, 15 aa, Severe acute respiratory syndrome coronavirus 2
FKSVLYYQNNVFMSE

SEQ ID NO: 94282 - protein, 15 aa, Severe acute respiratory syndrome coronavirus 2
KSVLYYQNNVFMSEA

SEQ ID NO: 94283 - protein, 15 aa, Severe acute respiratory syndrome coronavirus 2
SVLYYQNNVFMSEAK

SEQ ID NO: 94284 - protein, 15 aa, Severe acute respiratory syndrome coronavirus 2
VLYYQNNVFMSEAKC

SEQ ID NO: 94285 - protein, 15 aa, Severe acute respiratory syndrome coronavirus 2
LYYQNNVFMSEAKCW

SEQ ID NO: 94286 - protein, 15 aa, Severe acute respiratory syndrome coronavirus 2
YYQNNVFMSEAKCWT

SEQ ID NO: 94287 - protein, 15 aa, Severe acute respiratory syndrome coronavirus 2
YQNNVFMSEAKCWTE

SEQ ID NO: 94288 - protein, 15 aa, Severe acute respiratory syndrome coronavirus 2
QNNVFMSEAKCWTET

SEQ ID NO: 94289 - protein, 15 aa, Severe acute respiratory syndrome coronavirus 2
NNVFMSEAKCWTETD

SEQ ID NO: 94290 - protein, 15 aa, Severe acute respiratory syndrome coronavirus 2
NVFMSEAKCWTETDL

SEQ ID NO: 94291 - protein, 15 aa, Severe acute respiratory syndrome coronavirus 2
YPDPSRILGAGCFVD

SEQ ID NO: 94292 - protein, 15 aa, Severe acute respiratory syndrome coronavirus 2
PDPSRILGAGCFVDD

SEQ ID NO: 94293 - protein, 15 aa, Severe acute respiratory syndrome coronavirus 2
DPSRILGAGCFVDDI

SEQ ID NO: 94294 - protein, 15 aa, Severe acute respiratory syndrome coronavirus 2
PSRILGAGCFVDDIV

SEQ ID NO: 94295 - protein, 15 aa, Severe acute respiratory syndrome coronavirus 2
SRILGAGCFVDDIVK

SEQ ID NO: 94296 - protein, 15 aa, Severe acute respiratory syndrome coronavirus 2
RILGAGCFVDDIVKT

SEQ ID NO: 94297 - protein, 15 aa, Severe acute respiratory syndrome coronavirus 2
ILGAGCFVDDIVKTD

SEQ ID NO: 94298 - protein, 15 aa, Severe acute respiratory syndrome coronavirus 2
GCFVDDIVKTDGTLM

SEQ ID NO: 94299 - protein, 15 aa, Severe acute respiratory syndrome coronavirus 2
CFVDDIVKTDGTLMI

SEQ ID NO: 94300 - protein, 15 aa, Severe acute respiratory syndrome coronavirus 2
FVDDIVKTDGTLMIE

SEQ ID NO: 94301 - protein, 15 aa, Severe acute respiratory syndrome coronavirus 2
VDDIVKTDGTLMIER

SEQ ID NO: 94302 - protein, 15 aa, Severe acute respiratory syndrome coronavirus 2
DDIVKTDGTLMIERF

SEQ ID NO: 94303 - protein, 15 aa, Severe acute respiratory syndrome coronavirus 2
DIVKTDGTLMIERFV

SEQ ID NO: 94304 - protein, 15 aa, Severe acute respiratory syndrome coronavirus 2
IVKTDGTLMIERFVS

SEQ ID NO: 94305 - protein, 15 aa, Severe acute respiratory syndrome coronavirus 2
VKTDGTLMIERFVSL

SEQ ID NO: 94306 - protein, 15 aa, Severe acute respiratory syndrome coronavirus 2
KTDGTLMIERFVSLA

SEQ ID NO: 94307 - protein, 15 aa, Severe acute respiratory syndrome coronavirus 2
TDGTLMIERFVSLAI

SEQ ID NO: 94308 - protein, 15 aa, Severe acute respiratory syndrome coronavirus 2
DGTLMIERFVSLAID

SEQ ID NO: 94309 - protein, 15 aa, Severe acute respiratory syndrome coronavirus 2
GTLMIERFVSLAIDA

SEQ ID NO: 94310 - protein, 15 aa, Severe acute respiratory syndrome coronavirus 2
TLMIERFVSLAIDAY

SEQ ID NO: 94311 - protein, 15 aa, Severe acute respiratory syndrome coronavirus 2
LMIERFVSLAIDAYP

SEQ ID NO: 94312 - protein, 15 aa, Severe acute respiratory syndrome coronavirus 2
MIERFVSLAIDAYPL

SEQ ID NO: 94313 - protein, 15 aa, Severe acute respiratory syndrome coronavirus 2
QEYADVFHLYLQYIR

SEQ ID NO: 94314 - protein, 15 aa, Severe acute respiratory syndrome coronavirus 2
EYADVFHLYLQYIRK

SEQ ID NO: 94315 - protein, 15 aa, Severe acute respiratory syndrome coronavirus 2
YADVFHLYLQYIRKL

SEQ ID NO: 94316 - protein, 15 aa, Severe acute respiratory syndrome coronavirus 2
ELTGHMLDMYSVMLT

SEQ ID NO: 94317 - protein, 15 aa, Severe acute respiratory syndrome coronavirus 2
LTGHMLDMYSVMLTN

SEQ ID NO: 94318 - protein, 15 aa, Severe acute respiratory syndrome coronavirus 2
TGHMLDMYSVMLTND

SEQ ID NO: 94319 - protein, 15 aa, Severe acute respiratory syndrome coronavirus 2
EPEFYEAMYTPHTVL

SEQ ID NO: 94320 - protein, 15 aa, Severe acute respiratory syndrome coronavirus 2
PEFYEAMYTPHTVLQ

SEQ ID NO: 94321 - protein, 15 aa, Severe acute respiratory syndrome coronavirus 2
AVGACVLCNSQTSLR

SEQ ID NO: 94322 - protein, 15 aa, Severe acute respiratory syndrome coronavirus 2
VGACVLCNSQTSLRC

SEQ ID NO: 94323 - protein, 15 aa, Severe acute respiratory syndrome coronavirus 2
GACVLCNSQTSLRCG

SEQ ID NO: 94324 - protein, 15 aa, Severe acute respiratory syndrome coronavirus 2
TDVTQLYLGGMSYYC

SEQ ID NO: 94325 - protein, 15 aa, Severe acute respiratory syndrome coronavirus 2
DVTQLYLGGMSYYCK

SEQ ID NO: 94326 - protein, 15 aa, Severe acute respiratory syndrome coronavirus 2
ISFPLCANGQVFGLY

SEQ ID NO: 94327 - protein, 15 aa, Severe acute respiratory syndrome coronavirus 2
SFPLCANGQVFGLYK

SEQ ID NO: 94328 - protein, 15 aa, Severe acute respiratory syndrome coronavirus 2
FPLCANGQVFGLYKN

SEQ ID NO: 94329 - protein, 15 aa, Severe acute respiratory syndrome coronavirus 2
PLCANGQVFGLYKNT

SEQ ID NO: 94330 - protein, 15 aa, Severe acute respiratory syndrome coronavirus 2
LCANGQVFGLYKNTC

SEQ ID NO: 94331 - protein, 15 aa, Severe acute respiratory syndrome coronavirus 2
CANGQVFGLYKNTCV

SEQ ID NO: 94332 - protein, 15 aa, Severe acute respiratory syndrome coronavirus 2
ANGQVFGLYKNTCVG

SEQ ID NO: 94333 - protein, 15 aa, Severe acute respiratory syndrome coronavirus 2
NGQVFGLYKNTCVGS

SEQ ID NO: 94334 - protein, 15 aa, Severe acute respiratory syndrome coronavirus 2
GQVFGLYKNTCVGSD

SEQ ID NO: 94335 - protein, 15 aa, Severe acute respiratory syndrome coronavirus 2
VTDFNAIATCDWTNA

SEQ ID NO: 94336 - protein, 15 aa, Severe acute respiratory syndrome coronavirus 2
IATCDWTNAGDYILA

SEQ ID NO: 94337 - protein, 15 aa, Severe acute respiratory syndrome coronavirus 2
ATCDWTNAGDYILAN

SEQ ID NO: 94338 - protein, 15 aa, Severe acute respiratory syndrome coronavirus 2
TCDWTNAGDYILANT

SEQ ID NO: 94339 - protein, 15 aa, Severe acute respiratory syndrome coronavirus 2
CDWTNAGDYILANTC

SEQ ID NO: 94340 - protein, 15 aa, Severe acute respiratory syndrome coronavirus 2
EETFKLSYGIATVRE

SEQ ID NO: 94341 - protein, 15 aa, Severe acute respiratory syndrome coronavirus 2
ETFKLSYGIATVREV

SEQ ID NO: 94342 - protein, 15 aa, Severe acute respiratory syndrome coronavirus 2
TFKLSYGIATVREVL

SEQ ID NO: 94343 - protein, 15 aa, Severe acute respiratory syndrome coronavirus 2
FKLSYGIATVREVLS

SEQ ID NO: 94344 - protein, 15 aa, Severe acute respiratory syndrome coronavirus 2
KLSYGIATVREVLSD

SEQ ID NO: 94345 - protein, 15 aa, Severe acute respiratory syndrome coronavirus 2
LSYGIATVREVLSDR

SEQ ID NO: 94346 - protein, 15 aa, Severe acute respiratory syndrome coronavirus 2
SYGIATVREVLSDRE

SEQ ID NO: 94347 - protein, 15 aa, Severe acute respiratory syndrome coronavirus 2
YGIATVREVLSDREL

SEQ ID NO: 94348 - protein, 15 aa, Severe acute respiratory syndrome coronavirus 2
RPPLNRNYVFTGYRV

SEQ ID NO: 94349 - protein, 15 aa, Severe acute respiratory syndrome coronavirus 2
PPLNRNYVFTGYRVT

SEQ ID NO: 94350 - protein, 15 aa, Severe acute respiratory syndrome coronavirus 2
PLNRNYVFTGYRVTK

SEQ ID NO: 94351 - protein, 15 aa, Severe acute respiratory syndrome coronavirus 2
LNRNYVFTGYRVTKN

SEQ ID NO: 94352 - protein, 15 aa, Severe acute respiratory syndrome coronavirus 2
NRNYVFTGYRVTKNS

SEQ ID NO: 94353 - protein, 15 aa, Severe acute respiratory syndrome coronavirus 2
RNYVFTGYRVTKNSK

SEQ ID NO: 94354 - protein, 15 aa, Severe acute respiratory syndrome coronavirus 2
VYTACSHAAVDALCE

SEQ ID NO: 94355 - protein, 15 aa, Severe acute respiratory syndrome coronavirus 2
YTACSHAAVDALCEK

SEQ ID NO: 94356 - protein, 15 aa, Severe acute respiratory syndrome coronavirus 2
TACSHAAVDALCEKA

SEQ ID NO: 94357 - protein, 15 aa, Severe acute respiratory syndrome coronavirus 2
ACSHAAVDALCEKAL

SEQ ID NO: 94358 - protein, 15 aa, Severe acute respiratory syndrome coronavirus 2
CSHAAVDALCEKALK

SEQ ID NO: 94359 - protein, 15 aa, Severe acute respiratory syndrome coronavirus 2
SHAAVDALCEKALKY

SEQ ID NO: 94360 - protein, 15 aa, Severe acute respiratory syndrome coronavirus 2
HAAVDALCEKALKYL

SEQ ID NO: 94361 - protein, 15 aa, Severe acute respiratory syndrome coronavirus 2
AAVDALCEKALKYLP

SEQ ID NO: 94362 - protein, 15 aa, Severe acute respiratory syndrome coronavirus 2
AVDALCEKALKYLPI

SEQ ID NO: 94363 - protein, 15 aa, Severe acute respiratory syndrome coronavirus 2
VDALCEKALKYLPID

SEQ ID NO: 94364 - protein, 15 aa, Severe acute respiratory syndrome coronavirus 2
DALCEKALKYLPIDK

SEQ ID NO: 94365 - protein, 15 aa, Severe acute respiratory syndrome coronavirus 2
ALCEKALKYLPIDKC

SEQ ID NO: 94366 - protein, 15 aa, Severe acute respiratory syndrome coronavirus 2
LCEKALKYLPIDKCS

SEQ ID NO: 94367 - protein, 15 aa, Severe acute respiratory syndrome coronavirus 2
CEKALKYLPIDKCSR

SEQ ID NO: 94368 - protein, 15 aa, Severe acute respiratory syndrome coronavirus 2
EKALKYLPIDKCSRI

SEQ ID NO: 94369 - protein, 15 aa, Severe acute respiratory syndrome coronavirus 2
KALKYLPIDKCSRII

SEQ ID NO: 94370 - protein, 15 aa, Severe acute respiratory syndrome coronavirus 2
ALKYLPIDKCSRIIP

SEQ ID NO: 94371 - protein, 15 aa, Severe acute respiratory syndrome coronavirus 2
LKYLPIDKCSRIIPA

SEQ ID NO: 94372 - protein, 15 aa, Severe acute respiratory syndrome coronavirus 2
KYLPIDKCSRIIPAR

SEQ ID NO: 94373 - protein, 15 aa, Severe acute respiratory syndrome coronavirus 2
YLPIDKCSRIIPARA

SEQ ID NO: 94374 - protein, 15 aa, Severe acute respiratory syndrome coronavirus 2
LPIDKCSRIIPARAR

SEQ ID NO: 94375 - protein, 15 aa, Severe acute respiratory syndrome coronavirus 2
PIDKCSRIIPARARV

SEQ ID NO: 94376 - protein, 15 aa, Severe acute respiratory syndrome coronavirus 2
IDKCSRIIPARARVE

SEQ ID NO: 94377 - protein, 15 aa, Severe acute respiratory syndrome coronavirus 2
DKCSRIIPARARVEC

SEQ ID NO: 94378 - protein, 15 aa, Severe acute respiratory syndrome coronavirus 2
KCSRIIPARARVECF

SEQ ID NO: 94379 - protein, 15 aa, Severe acute respiratory syndrome coronavirus 2
CSRIIPARARVECFD

SEQ ID NO: 94380 - protein, 15 aa, Severe acute respiratory syndrome coronavirus 2
SRIIPARARVECFDK

SEQ ID NO: 94381 - protein, 15 aa, Severe acute respiratory syndrome coronavirus 2
RIIPARARVECFDKF

SEQ ID NO: 94382 - protein, 15 aa, Severe acute respiratory syndrome coronavirus 2
IIPARARVECFDKFK

SEQ ID NO: 94383 - protein, 15 aa, Severe acute respiratory syndrome coronavirus 2
HYVYIGDPAQLPAPR

SEQ ID NO: 94384 - protein, 15 aa, Severe acute respiratory syndrome coronavirus 2
YVYIGDPAQLPAPRT

SEQ ID NO: 94385 - protein, 15 aa, Severe acute respiratory syndrome coronavirus 2
VYIGDPAQLPAPRTL

SEQ ID NO: 94386 - protein, 15 aa, Severe acute respiratory syndrome coronavirus 2
YIGDPAQLPAPRTLL

SEQ ID NO: 94387 - protein, 15 aa, Severe acute respiratory syndrome coronavirus 2
FLGTCRRCPAEIVDT

SEQ ID NO: 94388 - protein, 15 aa, Severe acute respiratory syndrome coronavirus 2
LGTCRRCPAEIVDTV

SEQ ID NO: 94389 - protein, 15 aa, Severe acute respiratory syndrome coronavirus 2
GTCRRCPAEIVDTVS

SEQ ID NO: 94390 - protein, 15 aa, Severe acute respiratory syndrome coronavirus 2
TCRRCPAEIVDTVSA

SEQ ID NO: 94391 - protein, 15 aa, Severe acute respiratory syndrome coronavirus 2
SAINRPQIGVVREFL

SEQ ID NO: 94392 - protein, 15 aa, Severe acute respiratory syndrome coronavirus 2
AINRPQIGVVREFLT

SEQ ID NO: 94393 - protein, 15 aa, Severe acute respiratory syndrome coronavirus 2
INRPQIGVVREFLTR

SEQ ID NO: 94394 - protein, 15 aa, Severe acute respiratory syndrome coronavirus 2
NRPQIGVVREFLTRN

SEQ ID NO: 94395 - protein, 15 aa, Severe acute respiratory syndrome coronavirus 2
AWRKAVFISPYNSQN

SEQ ID NO: 94396 - protein, 15 aa, Severe acute respiratory syndrome coronavirus 2
WRKAVFISPYNSQNA

SEQ ID NO: 94397 - protein, 15 aa, Severe acute respiratory syndrome coronavirus 2
RKAVFISPYNSQNAV

SEQ ID NO: 94398 - protein, 15 aa, Severe acute respiratory syndrome coronavirus 2
KAVFISPYNSQNAVA

SEQ ID NO: 94399 - protein, 15 aa, Severe acute respiratory syndrome coronavirus 2
AVFISPYNSQNAVAS

SEQ ID NO: 94400 - protein, 15 aa, Severe acute respiratory syndrome coronavirus 2
ETAHSCNVNRFNVAI

SEQ ID NO: 94401 - protein, 15 aa, Severe acute respiratory syndrome coronavirus 2
TAHSCNVNRFNVAIT

SEQ ID NO: 94402 - protein, 15 aa, Severe acute respiratory syndrome coronavirus 2
AHSCNVNRFNVAITR

SEQ ID NO: 94403 - protein, 15 aa, Severe acute respiratory syndrome coronavirus 2
SDRDLYDKLQFTSLE

SEQ ID NO: 94404 - protein, 15 aa, Severe acute respiratory syndrome coronavirus 2
DRDLYDKLQFTSLEI

SEQ ID NO: 94405 - protein, 15 aa, Severe acute respiratory syndrome coronavirus 2
RDLYDKLQFTSLEIP

SEQ ID NO: 94406 - protein, 15 aa, Severe acute respiratory syndrome coronavirus 2
DLYDKLQFTSLEIPR

SEQ ID NO: 94407 - protein, 15 aa, Severe acute respiratory syndrome coronavirus 2
YDKLQFTSLEIPRRN

SEQ ID NO: 94408 - protein, 15 aa, Severe acute respiratory syndrome coronavirus 2
DKLQFTSLEIPRRNV

SEQ ID NO: 94409 - protein, 15 aa, Severe acute respiratory syndrome coronavirus 2
LSVDTKFKTEGLCVD

SEQ ID NO: 94410 - protein, 15 aa, Severe acute respiratory syndrome coronavirus 2
SVDTKFKTEGLCVDI

SEQ ID NO: 94411 - protein, 15 aa, Severe acute respiratory syndrome coronavirus 2
GIPKDMTYRRLISMM

SEQ ID NO: 94412 - protein, 15 aa, Severe acute respiratory syndrome coronavirus 2
IPKDMTYRRLISMMG

SEQ ID NO: 94413 - protein, 15 aa, Severe acute respiratory syndrome coronavirus 2
PKDMTYRRLISMMGF

SEQ ID NO: 94414 - protein, 15 aa, Severe acute respiratory syndrome coronavirus 2
KDMTYRRLISMMGFK

SEQ ID NO: 94415 - protein, 15 aa, Severe acute respiratory syndrome coronavirus 2
DMTYRRLISMMGFKM

SEQ ID NO: 94416 - protein, 15 aa, Severe acute respiratory syndrome coronavirus 2
MTYRRLISMMGFKMN

SEQ ID NO: 94417 - protein, 15 aa, Severe acute respiratory syndrome coronavirus 2
TYRRLISMMGFKMNY

SEQ ID NO: 94418 - protein, 15 aa, Severe acute respiratory syndrome coronavirus 2
YRRLISMMGFKMNYQ

SEQ ID NO: 94419 - protein, 15 aa, Severe acute respiratory syndrome coronavirus 2
RRLISMMGFKMNYQV

SEQ ID NO: 94420 - protein, 15 aa, Severe acute respiratory syndrome coronavirus 2
RLISMMGFKMNYQVN

SEQ ID NO: 94421 - protein, 15 aa, Severe acute respiratory syndrome coronavirus 2
LISMMGFKMNYQVNG

SEQ ID NO: 94422 - protein, 15 aa, Severe acute respiratory syndrome coronavirus 2
ISMMGFKMNYQVNGY

SEQ ID NO: 94423 - protein, 15 aa, Severe acute respiratory syndrome coronavirus 2
SMMGFKMNYQVNGYP

SEQ ID NO: 94424 - protein, 15 aa, Severe acute respiratory syndrome coronavirus 2
MMGFKMNYQVNGYPN

SEQ ID NO: 94425 - protein, 15 aa, Severe acute respiratory syndrome coronavirus 2
MGFKMNYQVNGYPNM

SEQ ID NO: 94426 - protein, 15 aa, Severe acute respiratory syndrome coronavirus 2
GFKMNYQVNGYPNMF

SEQ ID NO: 94427 - protein, 15 aa, Severe acute respiratory syndrome coronavirus 2
FKMNYQVNGYPNMFI

SEQ ID NO: 94428 - protein, 15 aa, Severe acute respiratory syndrome coronavirus 2
KMNYQVNGYPNMFIT

SEQ ID NO: 94429 - protein, 15 aa, Severe acute respiratory syndrome coronavirus 2
MNYQVNGYPNMFITR

SEQ ID NO: 94430 - protein, 15 aa, Severe acute respiratory syndrome coronavirus 2
NYQVNGYPNMFITRE

SEQ ID NO: 94431 - protein, 15 aa, Severe acute respiratory syndrome coronavirus 2
YQVNGYPNMFITREE

SEQ ID NO: 94432 - protein, 15 aa, Severe acute respiratory syndrome coronavirus 2
QVNGYPNMFITREEA

SEQ ID NO: 94433 - protein, 15 aa, Severe acute respiratory syndrome coronavirus 2
VNGYPNMFITREEAI

SEQ ID NO: 94434 - protein, 15 aa, Severe acute respiratory syndrome coronavirus 2
FITREEAIRHVRAWI

SEQ ID NO: 94435 - protein, 15 aa, Severe acute respiratory syndrome coronavirus 2
ITREEAIRHVRAWIG

SEQ ID NO: 94436 - protein, 15 aa, Severe acute respiratory syndrome coronavirus 2
TREEAIRHVRAWIGF

SEQ ID NO: 94437 - protein, 15 aa, Severe acute respiratory syndrome coronavirus 2
REEAIRHVRAWIGFD

SEQ ID NO: 94438 - protein, 15 aa, Severe acute respiratory syndrome coronavirus 2
RHVRAWIGFDVEGCH

SEQ ID NO: 94439 - protein, 15 aa, Severe acute respiratory syndrome coronavirus 2
HVRAWIGFDVEGCHA

SEQ ID NO: 94440 - protein, 15 aa, Severe acute respiratory syndrome coronavirus 2
VRAWIGFDVEGCHAT

SEQ ID NO: 94441 - protein, 15 aa, Severe acute respiratory syndrome coronavirus 2
RAWIGFDVEGCHATR

SEQ ID NO: 94442 - protein, 15 aa, Severe acute respiratory syndrome coronavirus 2
HATREAVGTNLPLQL

SEQ ID NO: 94443 - protein, 15 aa, Severe acute respiratory syndrome coronavirus 2
ATREAVGTNLPLQLG

SEQ ID NO: 94444 - protein, 15 aa, Severe acute respiratory syndrome coronavirus 2
TREAVGTNLPLQLGF

SEQ ID NO: 94445 - protein, 15 aa, Severe acute respiratory syndrome coronavirus 2
REAVGTNLPLQLGFS

SEQ ID NO: 94446 - protein, 15 aa, Severe acute respiratory syndrome coronavirus 2
PWNVVRLKIVQMLSD

SEQ ID NO: 94447 - protein, 15 aa, Severe acute respiratory syndrome coronavirus 2
WNVVRLKIVQMLSDT

SEQ ID NO: 94448 - protein, 15 aa, Severe acute respiratory syndrome coronavirus 2
NVVRLKIVQMLSDTL

SEQ ID NO: 94449 - protein, 15 aa, Severe acute respiratory syndrome coronavirus 2
VVRLKIVQMLSDTLK

SEQ ID NO: 94450 - protein, 15 aa, Severe acute respiratory syndrome coronavirus 2
SDRVVFVLWAHGFEL

SEQ ID NO: 94451 - protein, 15 aa, Severe acute respiratory syndrome coronavirus 2
DRVVFVLWAHGFELT

SEQ ID NO: 94452 - protein, 15 aa, Severe acute respiratory syndrome coronavirus 2
RVVFVLWAHGFELTS

SEQ ID NO: 94453 - protein, 15 aa, Severe acute respiratory syndrome coronavirus 2
VVFVLWAHGFELTSM

SEQ ID NO: 94454 - protein, 15 aa, Severe acute respiratory syndrome coronavirus 2
VFVLWAHGFELTSMK

SEQ ID NO: 94455 - protein, 15 aa, Severe acute respiratory syndrome coronavirus 2
FVLWAHGFELTSMKY

SEQ ID NO: 94456 - protein, 15 aa, Severe acute respiratory syndrome coronavirus 2
VLWAHGFELTSMKYF

SEQ ID NO: 94457 - protein, 15 aa, Severe acute respiratory syndrome coronavirus 2
LWAHGFELTSMKYFV

SEQ ID NO: 94458 - protein, 15 aa, Severe acute respiratory syndrome coronavirus 2
WAHGFELTSMKYFVK

SEQ ID NO: 94459 - protein, 15 aa, Severe acute respiratory syndrome coronavirus 2
AHGFELTSMKYFVKI

SEQ ID NO: 94460 - protein, 15 aa, Severe acute respiratory syndrome coronavirus 2
HGFELTSMKYFVKIG

SEQ ID NO: 94461 - protein, 15 aa, Severe acute respiratory syndrome coronavirus 2
GFELTSMKYFVKIGP

SEQ ID NO: 94462 - protein, 15 aa, Severe acute respiratory syndrome coronavirus 2
FELTSMKYFVKIGPE

SEQ ID NO: 94463 - protein, 15 aa, Severe acute respiratory syndrome coronavirus 2
ELTSMKYFVKIGPER

SEQ ID NO: 94464 - protein, 15 aa, Severe acute respiratory syndrome coronavirus 2
LTSMKYFVKIGPERT

SEQ ID NO: 94465 - protein, 15 aa, Severe acute respiratory syndrome coronavirus 2
TSMKYFVKIGPERTC

SEQ ID NO: 94466 - protein, 15 aa, Severe acute respiratory syndrome coronavirus 2
SMKYFVKIGPERTCC

SEQ ID NO: 94467 - protein, 15 aa, Severe acute respiratory syndrome coronavirus 2
MKYFVKIGPERTCCL

SEQ ID NO: 94468 - protein, 15 aa, Severe acute respiratory syndrome coronavirus 2
KYFVKIGPERTCCLC

SEQ ID NO: 94469 - protein, 15 aa, Severe acute respiratory syndrome coronavirus 2
YFVKIGPERTCCLCD

SEQ ID NO: 94470 - protein, 15 aa, Severe acute respiratory syndrome coronavirus 2
RATCFSTASDTYACW

SEQ ID NO: 94471 - protein, 15 aa, Severe acute respiratory syndrome coronavirus 2
ATCFSTASDTYACWH

SEQ ID NO: 94472 - protein, 15 aa, Severe acute respiratory syndrome coronavirus 2
TCFSTASDTYACWHH

SEQ ID NO: 94473 - protein, 15 aa, Severe acute respiratory syndrome coronavirus 2
CFSTASDTYACWHHS

SEQ ID NO: 94474 - protein, 15 aa, Severe acute respiratory syndrome coronavirus 2
FSTASDTYACWHHSI

SEQ ID NO: 94475 - protein, 15 aa, Severe acute respiratory syndrome coronavirus 2
NHDLYCQVHGNAHVA

SEQ ID NO: 94476 - protein, 15 aa, Severe acute respiratory syndrome coronavirus 2
HDLYCQVHGNAHVAS

SEQ ID NO: 94477 - protein, 15 aa, Severe acute respiratory syndrome coronavirus 2
DLYCQVHGNAHVASC

SEQ ID NO: 94478 - protein, 15 aa, Severe acute respiratory syndrome coronavirus 2
LYCQVHGNAHVASCD

SEQ ID NO: 94479 - protein, 15 aa, Severe acute respiratory syndrome coronavirus 2
LLADKFPVLHDIGNP

SEQ ID NO: 94480 - protein, 15 aa, Severe acute respiratory syndrome coronavirus 2
LADKFPVLHDIGNPK

SEQ ID NO: 94481 - protein, 15 aa, Severe acute respiratory syndrome coronavirus 2
DKFPVLHDIGNPKAI

SEQ ID NO: 94482 - protein, 15 aa, Severe acute respiratory syndrome coronavirus 2
KFPVLHDIGNPKAIK

SEQ ID NO: 94483 - protein, 15 aa, Severe acute respiratory syndrome coronavirus 2
FPVLHDIGNPKAIKC

SEQ ID NO: 94484 - protein, 15 aa, Severe acute respiratory syndrome coronavirus 2
PVLHDIGNPKAIKCV

SEQ ID NO: 94485 - protein, 15 aa, Severe acute respiratory syndrome coronavirus 2
NPKAIKCVPQADVEW

SEQ ID NO: 94486 - protein, 15 aa, Severe acute respiratory syndrome coronavirus 2
CSDKAYKIEELFYSY

SEQ ID NO: 94487 - protein, 15 aa, Severe acute respiratory syndrome coronavirus 2
GVCLFWNCNVDRYPA

SEQ ID NO: 94488 - protein, 15 aa, Severe acute respiratory syndrome coronavirus 2
VCLFWNCNVDRYPAN

SEQ ID NO: 94489 - protein, 15 aa, Severe acute respiratory syndrome coronavirus 2
CLFWNCNVDRYPANS

SEQ ID NO: 94490 - protein, 15 aa, Severe acute respiratory syndrome coronavirus 2
LFWNCNVDRYPANSI

SEQ ID NO: 94491 - protein, 15 aa, Severe acute respiratory syndrome coronavirus 2
FWNCNVDRYPANSIV

SEQ ID NO: 94492 - protein, 15 aa, Severe acute respiratory syndrome coronavirus 2
WNCNVDRYPANSIVC

SEQ ID NO: 94493 - protein, 15 aa, Severe acute respiratory syndrome coronavirus 2
NCNVDRYPANSIVCR

SEQ ID NO: 94494 - protein, 15 aa, Severe acute respiratory syndrome coronavirus 2
CNVDRYPANSIVCRF

SEQ ID NO: 94495 - protein, 15 aa, Severe acute respiratory syndrome coronavirus 2
NVDRYPANSIVCRFD

SEQ ID NO: 94496 - protein, 15 aa, Severe acute respiratory syndrome coronavirus 2
VDRYPANSIVCRFDT

SEQ ID NO: 94497 - protein, 15 aa, Severe acute respiratory syndrome coronavirus 2
DRYPANSIVCRFDTR

SEQ ID NO: 94498 - protein, 15 aa, Severe acute respiratory syndrome coronavirus 2
RYPANSIVCRFDTRV

SEQ ID NO: 94499 - protein, 15 aa, Severe acute respiratory syndrome coronavirus 2
YPANSIVCRFDTRVL

SEQ ID NO: 94500 - protein, 15 aa, Severe acute respiratory syndrome coronavirus 2
PANSIVCRFDTRVLS

SEQ ID NO: 94501 - protein, 15 aa, Severe acute respiratory syndrome coronavirus 2
ANSIVCRFDTRVLSN

SEQ ID NO: 94502 - protein, 15 aa, Severe acute respiratory syndrome coronavirus 2
NSIVCRFDTRVLSNL

SEQ ID NO: 94503 - protein, 15 aa, Severe acute respiratory syndrome coronavirus 2
SIVCRFDTRVLSNLN

SEQ ID NO: 94504 - protein, 15 aa, Severe acute respiratory syndrome coronavirus 2
IVCRFDTRVLSNLNL

SEQ ID NO: 94505 - protein, 15 aa, Severe acute respiratory syndrome coronavirus 2
GCDGGSLYVNKHAFH

SEQ ID NO: 94506 - protein, 15 aa, Severe acute respiratory syndrome coronavirus 2
CDGGSLYVNKHAFHT

SEQ ID NO: 94507 - protein, 15 aa, Severe acute respiratory syndrome coronavirus 2
DGGSLYVNKHAFHTP

SEQ ID NO: 94508 - protein, 15 aa, Severe acute respiratory syndrome coronavirus 2
DKSAFVNLKQLPFFY

SEQ ID NO: 94509 - protein, 15 aa, Severe acute respiratory syndrome coronavirus 2
KSAFVNLKQLPFFYY

SEQ ID NO: 94510 - protein, 15 aa, Severe acute respiratory syndrome coronavirus 2
SAFVNLKQLPFFYYS

SEQ ID NO: 94511 - protein, 15 aa, Severe acute respiratory syndrome coronavirus 2
AFVNLKQLPFFYYSD

SEQ ID NO: 94512 - protein, 15 aa, Severe acute respiratory syndrome coronavirus 2
FVNLKQLPFFYYSDS

SEQ ID NO: 94513 - protein, 15 aa, Severe acute respiratory syndrome coronavirus 2
VNLKQLPFFYYSDSP

SEQ ID NO: 94514 - protein, 15 aa, Severe acute respiratory syndrome coronavirus 2
NLKQLPFFYYSDSPC

SEQ ID NO: 94515 - protein, 15 aa, Severe acute respiratory syndrome coronavirus 2
LKQLPFFYYSDSPCE

SEQ ID NO: 94516 - protein, 15 aa, Severe acute respiratory syndrome coronavirus 2
KQLPFFYYSDSPCES

SEQ ID NO: 94517 - protein, 15 aa, Severe acute respiratory syndrome coronavirus 2
QLPFFYYSDSPCESH

SEQ ID NO: 94518 - protein, 15 aa, Severe acute respiratory syndrome coronavirus 2
LPFFYYSDSPCESHG

SEQ ID NO: 94519 - protein, 15 aa, Severe acute respiratory syndrome coronavirus 2
PFFYYSDSPCESHGK

SEQ ID NO: 94520 - protein, 15 aa, Severe acute respiratory syndrome coronavirus 2
FFYYSDSPCESHGKQ

SEQ ID NO: 94521 - protein, 15 aa, Severe acute respiratory syndrome coronavirus 2
GKQVVSDIDYVPLKS

SEQ ID NO: 94522 - protein, 15 aa, Severe acute respiratory syndrome coronavirus 2
KQVVSDIDYVPLKSA

SEQ ID NO: 94523 - protein, 15 aa, Severe acute respiratory syndrome coronavirus 2
VVSDIDYVPLKSATC

SEQ ID NO: 94524 - protein, 15 aa, Severe acute respiratory syndrome coronavirus 2
VSDIDYVPLKSATCI

SEQ ID NO: 94525 - protein, 15 aa, Severe acute respiratory syndrome coronavirus 2
SDIDYVPLKSATCIT

SEQ ID NO: 94526 - protein, 15 aa, Severe acute respiratory syndrome coronavirus 2
DIDYVPLKSATCITR

SEQ ID NO: 94527 - protein, 15 aa, Severe acute respiratory syndrome coronavirus 2
IDYVPLKSATCITRC

SEQ ID NO: 94528 - protein, 15 aa, Severe acute respiratory syndrome coronavirus 2
DYVPLKSATCITRCN

SEQ ID NO: 94529 - protein, 15 aa, Severe acute respiratory syndrome coronavirus 2
YVPLKSATCITRCNL

SEQ ID NO: 94530 - protein, 15 aa, Severe acute respiratory syndrome coronavirus 2
VPLKSATCITRCNLG

SEQ ID NO: 94531 - protein, 15 aa, Severe acute respiratory syndrome coronavirus 2
ISAGFSLWVYKQFDT

SEQ ID NO: 94532 - protein, 15 aa, Severe acute respiratory syndrome coronavirus 2
SAGFSLWVYKQFDTY

SEQ ID NO: 94533 - protein, 15 aa, Severe acute respiratory syndrome coronavirus 2
AGFSLWVYKQFDTYN

SEQ ID NO: 94534 - protein, 15 aa, Severe acute respiratory syndrome coronavirus 2
GFSLWVYKQFDTYNL

SEQ ID NO: 94535 - protein, 15 aa, Severe acute respiratory syndrome coronavirus 2
FSLWVYKQFDTYNLW

SEQ ID NO: 94536 - protein, 15 aa, Severe acute respiratory syndrome coronavirus 2
SLWVYKQFDTYNLWN

SEQ ID NO: 94537 - protein, 15 aa, Severe acute respiratory syndrome coronavirus 2
LWVYKQFDTYNLWNT

SEQ ID NO: 94538 - protein, 15 aa, Severe acute respiratory syndrome coronavirus 2
WVYKQFDTYNLWNTF

SEQ ID NO: 94539 - protein, 15 aa, Severe acute respiratory syndrome coronavirus 2
VYKQFDTYNLWNTFT

SEQ ID NO: 94540 - protein, 15 aa, Severe acute respiratory syndrome coronavirus 2
YKQFDTYNLWNTFTR

SEQ ID NO: 94541 - protein, 15 aa, Severe acute respiratory syndrome coronavirus 2
KQFDTYNLWNTFTRL

SEQ ID NO: 94542 - protein, 15 aa, Severe acute respiratory syndrome coronavirus 2
QFDTYNLWNTFTRLQ

SEQ ID NO: 94543 - protein, 15 aa, Severe acute respiratory syndrome coronavirus 2
KTTLPVNVAFELWAK

SEQ ID NO: 94544 - protein, 15 aa, Severe acute respiratory syndrome coronavirus 2
TTLPVNVAFELWAKR

SEQ ID NO: 94545 - protein, 15 aa, Severe acute respiratory syndrome coronavirus 2
TLPVNVAFELWAKRN

SEQ ID NO: 94546 - protein, 15 aa, Severe acute respiratory syndrome coronavirus 2
LPVNVAFELWAKRNI

SEQ ID NO: 94547 - protein, 15 aa, Severe acute respiratory syndrome coronavirus 2
PVNVAFELWAKRNIK

SEQ ID NO: 94548 - protein, 15 aa, Severe acute respiratory syndrome coronavirus 2
VNVAFELWAKRNIKP

SEQ ID NO: 94549 - protein, 15 aa, Severe acute respiratory syndrome coronavirus 2
NVAFELWAKRNIKPV

SEQ ID NO: 94550 - protein, 15 aa, Severe acute respiratory syndrome coronavirus 2
VAFELWAKRNIKPVP

SEQ ID NO: 94551 - protein, 15 aa, Severe acute respiratory syndrome coronavirus 2
AFELWAKRNIKPVPE

SEQ ID NO: 94552 - protein, 15 aa, Severe acute respiratory syndrome coronavirus 2
IAANTVIWDYKRDAP

SEQ ID NO: 94553 - protein, 15 aa, Severe acute respiratory syndrome coronavirus 2
AANTVIWDYKRDAPA

SEQ ID NO: 94554 - protein, 15 aa, Severe acute respiratory syndrome coronavirus 2
ANTVIWDYKRDAPAH

SEQ ID NO: 94555 - protein, 15 aa, Severe acute respiratory syndrome coronavirus 2
NTVIWDYKRDAPAHI

SEQ ID NO: 94556 - protein, 15 aa, Severe acute respiratory syndrome coronavirus 2
TVIWDYKRDAPAHIS

SEQ ID NO: 94557 - protein, 15 aa, Severe acute respiratory syndrome coronavirus 2
VIWDYKRDAPAHIST

SEQ ID NO: 94558 - protein, 15 aa, Severe acute respiratory syndrome coronavirus 2
IWDYKRDAPAHISTI

SEQ ID NO: 94559 - protein, 15 aa, Severe acute respiratory syndrome coronavirus 2
WDYKRDAPAHISTIG

SEQ ID NO: 94560 - protein, 15 aa, Severe acute respiratory syndrome coronavirus 2
DYKRDAPAHISTIGV

SEQ ID NO: 94561 - protein, 15 aa, Severe acute respiratory syndrome coronavirus 2
YKRDAPAHISTIGVC

SEQ ID NO: 94562 - protein, 15 aa, Severe acute respiratory syndrome coronavirus 2
KRDAPAHISTIGVCS

SEQ ID NO: 94563 - protein, 15 aa, Severe acute respiratory syndrome coronavirus 2
RDAPAHISTIGVCSM

SEQ ID NO: 94564 - protein, 15 aa, Severe acute respiratory syndrome coronavirus 2
DAPAHISTIGVCSMT

SEQ ID NO: 94565 - protein, 15 aa, Severe acute respiratory syndrome coronavirus 2
APAHISTIGVCSMTD

SEQ ID NO: 94566 - protein, 15 aa, Severe acute respiratory syndrome coronavirus 2
PAHISTIGVCSMTDI

SEQ ID NO: 94567 - protein, 15 aa, Severe acute respiratory syndrome coronavirus 2
AHISTIGVCSMTDIA

SEQ ID NO: 94568 - protein, 15 aa, Severe acute respiratory syndrome coronavirus 2
HISTIGVCSMTDIAK

SEQ ID NO: 94569 - protein, 15 aa, Severe acute respiratory syndrome coronavirus 2
ISTIGVCSMTDIAKK

SEQ ID NO: 94570 - protein, 15 aa, Severe acute respiratory syndrome coronavirus 2
TIGVCSMTDIAKKPT

SEQ ID NO: 94571 - protein, 15 aa, Severe acute respiratory syndrome coronavirus 2
EGSVKGLQPSVGPKQ

SEQ ID NO: 94572 - protein, 15 aa, Severe acute respiratory syndrome coronavirus 2
GSVKGLQPSVGPKQA

SEQ ID NO: 94573 - protein, 15 aa, Severe acute respiratory syndrome coronavirus 2
SVKGLQPSVGPKQAS

SEQ ID NO: 94574 - protein, 15 aa, Severe acute respiratory syndrome coronavirus 2
VKGLQPSVGPKQASL

SEQ ID NO: 94575 - protein, 15 aa, Severe acute respiratory syndrome coronavirus 2
KGLQPSVGPKQASLN

SEQ ID NO: 94576 - protein, 15 aa, Severe acute respiratory syndrome coronavirus 2
QPSVGPKQASLNGVT

SEQ ID NO: 94577 - protein, 15 aa, Severe acute respiratory syndrome coronavirus 2
PSVGPKQASLNGVTL

SEQ ID NO: 94578 - protein, 15 aa, Severe acute respiratory syndrome coronavirus 2
SVGPKQASLNGVTLI

SEQ ID NO: 94579 - protein, 15 aa, Severe acute respiratory syndrome coronavirus 2
VGPKQASLNGVTLIG

SEQ ID NO: 94580 - protein, 15 aa, Severe acute respiratory syndrome coronavirus 2
GPKQASLNGVTLIGE

SEQ ID NO: 94581 - protein, 15 aa, Severe acute respiratory syndrome coronavirus 2
PKQASLNGVTLIGEA

SEQ ID NO: 94582 - protein, 15 aa, Severe acute respiratory syndrome coronavirus 2
KTQFNYYKKVDGVVQ

SEQ ID NO: 94583 - protein, 15 aa, Severe acute respiratory syndrome coronavirus 2
TQFNYYKKVDGVVQQ

SEQ ID NO: 94584 - protein, 15 aa, Severe acute respiratory syndrome coronavirus 2
QFNYYKKVDGVVQQL

SEQ ID NO: 94585 - protein, 15 aa, Severe acute respiratory syndrome coronavirus 2
FNYYKKVDGVVQQLP

SEQ ID NO: 94586 - protein, 15 aa, Severe acute respiratory syndrome coronavirus 2
NYYKKVDGVVQQLPE

SEQ ID NO: 94587 - protein, 15 aa, Severe acute respiratory syndrome coronavirus 2
YYKKVDGVVQQLPET

SEQ ID NO: 94588 - protein, 15 aa, Severe acute respiratory syndrome coronavirus 2
YKKVDGVVQQLPETY

SEQ ID NO: 94589 - protein, 15 aa, Severe acute respiratory syndrome coronavirus 2
KKVDGVVQQLPETYF

SEQ ID NO: 94590 - protein, 15 aa, Severe acute respiratory syndrome coronavirus 2
VDGVVQQLPETYFTQ

SEQ ID NO: 94591 - protein, 15 aa, Severe acute respiratory syndrome coronavirus 2
GVVQQLPETYFTQSR

SEQ ID NO: 94592 - protein, 15 aa, Severe acute respiratory syndrome coronavirus 2
VQQLPETYFTQSRNL

SEQ ID NO: 94593 - protein, 15 aa, Severe acute respiratory syndrome coronavirus 2
QQLPETYFTQSRNLQ

SEQ ID NO: 94594 - protein, 15 aa, Severe acute respiratory syndrome coronavirus 2
QLPETYFTQSRNLQE

SEQ ID NO: 94595 - protein, 15 aa, Severe acute respiratory syndrome coronavirus 2
LPETYFTQSRNLQEF

SEQ ID NO: 94596 - protein, 15 aa, Severe acute respiratory syndrome coronavirus 2
PETYFTQSRNLQEFK

SEQ ID NO: 94597 - protein, 15 aa, Severe acute respiratory syndrome coronavirus 2
ETYFTQSRNLQEFKP

SEQ ID NO: 94598 - protein, 15 aa, Severe acute respiratory syndrome coronavirus 2
FSHSQLGGLHLLIGL

SEQ ID NO: 94599 - protein, 15 aa, Severe acute respiratory syndrome coronavirus 2
SHSQLGGLHLLIGLA

SEQ ID NO: 94600 - protein, 15 aa, Severe acute respiratory syndrome coronavirus 2
HSQLGGLHLLIGLAK

SEQ ID NO: 94601 - protein, 15 aa, Severe acute respiratory syndrome coronavirus 2
VIDLLLDDFVEIIKS

SEQ ID NO: 94602 - protein, 15 aa, Severe acute respiratory syndrome coronavirus 2
IDLLLDDFVEIIKSQ

SEQ ID NO: 94603 - protein, 15 aa, Severe acute respiratory syndrome coronavirus 2
EIIKSQDLSVVSKVV

SEQ ID NO: 94604 - protein, 15 aa, Severe acute respiratory syndrome coronavirus 2
IIKSQDLSVVSKVVK

SEQ ID NO: 94605 - protein, 15 aa, Severe acute respiratory syndrome coronavirus 2
TIDYTEISFMLWCKD

SEQ ID NO: 94606 - protein, 15 aa, Severe acute respiratory syndrome coronavirus 2
IDYTEISFMLWCKDG

SEQ ID NO: 94607 - protein, 15 aa, Severe acute respiratory syndrome coronavirus 2
SSQAWQPGVAMPNLY

SEQ ID NO: 94608 - protein, 15 aa, Severe acute respiratory syndrome coronavirus 2
SQAWQPGVAMPNLYK

SEQ ID NO: 94609 - protein, 15 aa, Severe acute respiratory syndrome coronavirus 2
LPKGIMMNVAKYTQL

SEQ ID NO: 94610 - protein, 15 aa, Severe acute respiratory syndrome coronavirus 2
PKGIMMNVAKYTQLC

SEQ ID NO: 94611 - protein, 15 aa, Severe acute respiratory syndrome coronavirus 2
KGIMMNVAKYTQLCQ

SEQ ID NO: 94612 - protein, 15 aa, Severe acute respiratory syndrome coronavirus 2
GIMMNVAKYTQLCQY

SEQ ID NO: 94613 - protein, 15 aa, Severe acute respiratory syndrome coronavirus 2
IMMNVAKYTQLCQYL

SEQ ID NO: 94614 - protein, 15 aa, Severe acute respiratory syndrome coronavirus 2
MMNVAKYTQLCQYLN

SEQ ID NO: 94615 - protein, 15 aa, Severe acute respiratory syndrome coronavirus 2
VAKYTQLCQYLNTLT

SEQ ID NO: 94616 - protein, 15 aa, Severe acute respiratory syndrome coronavirus 2
AKYTQLCQYLNTLTL

SEQ ID NO: 94617 - protein, 15 aa, Severe acute respiratory syndrome coronavirus 2
KYTQLCQYLNTLTLA

SEQ ID NO: 94618 - protein, 15 aa, Severe acute respiratory syndrome coronavirus 2
YTQLCQYLNTLTLAV

SEQ ID NO: 94619 - protein, 15 aa, Severe acute respiratory syndrome coronavirus 2
TQLCQYLNTLTLAVP

SEQ ID NO: 94620 - protein, 15 aa, Severe acute respiratory syndrome coronavirus 2
QLCQYLNTLTLAVPY

SEQ ID NO: 94621 - protein, 15 aa, Severe acute respiratory syndrome coronavirus 2
LCQYLNTLTLAVPYN

SEQ ID NO: 94622 - protein, 15 aa, Severe acute respiratory syndrome coronavirus 2
LTLAVPYNMRVIHFG

SEQ ID NO: 94623 - protein, 15 aa, Severe acute respiratory syndrome coronavirus 2
TLAVPYNMRVIHFGA

SEQ ID NO: 94624 - protein, 15 aa, Severe acute respiratory syndrome coronavirus 2
LAVPYNMRVIHFGAG

SEQ ID NO: 94625 - protein, 15 aa, Severe acute respiratory syndrome coronavirus 2
AVPYNMRVIHFGAGS

SEQ ID NO: 94626 - protein, 15 aa, Severe acute respiratory syndrome coronavirus 2
VPYNMRVIHFGAGSD

SEQ ID NO: 94627 - protein, 15 aa, Severe acute respiratory syndrome coronavirus 2
PYNMRVIHFGAGSDK

SEQ ID NO: 94628 - protein, 15 aa, Severe acute respiratory syndrome coronavirus 2
VAPGTAVLRQWLPTG

SEQ ID NO: 94629 - protein, 15 aa, Severe acute respiratory syndrome coronavirus 2
APGTAVLRQWLPTGT

SEQ ID NO: 94630 - protein, 15 aa, Severe acute respiratory syndrome coronavirus 2
PGTAVLRQWLPTGTL

SEQ ID NO: 94631 - protein, 15 aa, Severe acute respiratory syndrome coronavirus 2
GTAVLRQWLPTGTLL

SEQ ID NO: 94632 - protein, 15 aa, Severe acute respiratory syndrome coronavirus 2
TAVLRQWLPTGTLLV

SEQ ID NO: 94633 - protein, 15 aa, Severe acute respiratory syndrome coronavirus 2
AVLRQWLPTGTLLVD

SEQ ID NO: 94634 - protein, 15 aa, Severe acute respiratory syndrome coronavirus 2
VLRQWLPTGTLLVDS

SEQ ID NO: 94635 - protein, 15 aa, Severe acute respiratory syndrome coronavirus 2
LRQWLPTGTLLVDSD

SEQ ID NO: 94636 - protein, 15 aa, Severe acute respiratory syndrome coronavirus 2
RQWLPTGTLLVDSDL

SEQ ID NO: 94637 - protein, 15 aa, Severe acute respiratory syndrome coronavirus 2
QWLPTGTLLVDSDLN

SEQ ID NO: 94638 - protein, 15 aa, Severe acute respiratory syndrome coronavirus 2
WLPTGTLLVDSDLND

SEQ ID NO: 94639 - protein, 15 aa, Severe acute respiratory syndrome coronavirus 2
LPTGTLLVDSDLNDF

SEQ ID NO: 94640 - protein, 15 aa, Severe acute respiratory syndrome coronavirus 2
PTGTLLVDSDLNDFV

SEQ ID NO: 94641 - protein, 15 aa, Severe acute respiratory syndrome coronavirus 2
TGTLLVDSDLNDFVS

SEQ ID NO: 94642 - protein, 15 aa, Severe acute respiratory syndrome coronavirus 2
GTLLVDSDLNDFVSD

SEQ ID NO: 94643 - protein, 15 aa, Severe acute respiratory syndrome coronavirus 2
TLLVDSDLNDFVSDA

SEQ ID NO: 94644 - protein, 15 aa, Severe acute respiratory syndrome coronavirus 2
VHTANKWDLIISDMY

SEQ ID NO: 94645 - protein, 15 aa, Severe acute respiratory syndrome coronavirus 2
HTANKWDLIISDMYD

SEQ ID NO: 94646 - protein, 15 aa, Severe acute respiratory syndrome coronavirus 2
DSKEGFFTYICGFIQ

SEQ ID NO: 94647 - protein, 15 aa, Severe acute respiratory syndrome coronavirus 2
SKEGFFTYICGFIQQ

SEQ ID NO: 94648 - protein, 15 aa, Severe acute respiratory syndrome coronavirus 2
LALGGSVAIKITEHS

SEQ ID NO: 94649 - protein, 15 aa, Severe acute respiratory syndrome coronavirus 2
ALGGSVAIKITEHSW

SEQ ID NO: 94650 - protein, 15 aa, Severe acute respiratory syndrome coronavirus 2
LGGSVAIKITEHSWN

SEQ ID NO: 94651 - protein, 15 aa, Severe acute respiratory syndrome coronavirus 2
GGSVAIKITEHSWNA

SEQ ID NO: 94652 - protein, 15 aa, Severe acute respiratory syndrome coronavirus 2
GSVAIKITEHSWNAD

SEQ ID NO: 94653 - protein, 15 aa, Severe acute respiratory syndrome coronavirus 2
SVAIKITEHSWNADL

SEQ ID NO: 94654 - protein, 15 aa, Severe acute respiratory syndrome coronavirus 2
VAIKITEHSWNADLY

SEQ ID NO: 94655 - protein, 15 aa, Severe acute respiratory syndrome coronavirus 2
AIKITEHSWNADLYK

SEQ ID NO: 94656 - protein, 15 aa, Severe acute respiratory syndrome coronavirus 2
IKITEHSWNADLYKL

SEQ ID NO: 94657 - protein, 15 aa, Severe acute respiratory syndrome coronavirus 2
KITEHSWNADLYKLM

SEQ ID NO: 94658 - protein, 15 aa, Severe acute respiratory syndrome coronavirus 2
ITEHSWNADLYKLMG

SEQ ID NO: 94659 - protein, 15 aa, Severe acute respiratory syndrome coronavirus 2
TEHSWNADLYKLMGH

SEQ ID NO: 94660 - protein, 15 aa, Severe acute respiratory syndrome coronavirus 2
EHSWNADLYKLMGHF

SEQ ID NO: 94661 - protein, 15 aa, Severe acute respiratory syndrome coronavirus 2
LMGHFAWWTAFVTNV

SEQ ID NO: 94662 - protein, 15 aa, Severe acute respiratory syndrome coronavirus 2
LSSYSLFDMSKFPLK

SEQ ID NO: 94663 - protein, 15 aa, Severe acute respiratory syndrome coronavirus 2
SSYSLFDMSKFPLKL

SEQ ID NO: 94664 - protein, 15 aa, Severe acute respiratory syndrome coronavirus 2
SYSLFDMSKFPLKLR

SEQ ID NO: 94665 - protein, 15 aa, Severe acute respiratory syndrome coronavirus 2
YSLFDMSKFPLKLRG

SEQ ID NO: 94666 - protein, 15 aa, Severe acute respiratory syndrome coronavirus 2
SLFDMSKFPLKLRGT

SEQ ID NO: 94667 - protein, 15 aa, Severe acute respiratory syndrome coronavirus 2
LFDMSKFPLKLRGTA

SEQ ID NO: 94668 - protein, 15 aa, Severe acute respiratory syndrome coronavirus 2
FDMSKFPLKLRGTAV

SEQ ID NO: 94669 - protein, 15 aa, Severe acute respiratory syndrome coronavirus 2
DMSKFPLKLRGTAVM

SEQ ID NO: 94670 - protein, 15 aa, Severe acute respiratory syndrome coronavirus 2
MSKFPLKLRGTAVMS

SEQ ID NO: 94671 - protein, 15 aa, Severe acute respiratory syndrome coronavirus 2
SKFPLKLRGTAVMSL

SEQ ID NO: 94672 - protein, 15 aa, Severe acute respiratory syndrome coronavirus 2
KFPLKLRGTAVMSLK

SEQ ID NO: 94673 - protein, 15 aa, Severe acute respiratory syndrome coronavirus 2
FPLKLRGTAVMSLKE

SEQ ID NO: 94674 - protein, 15 aa, Severe acute respiratory syndrome coronavirus 2
QINDMILSLLSKGRL

SEQ ID NO: 94675 - protein, 15 aa, Severe acute respiratory syndrome coronavirus 2
INDMILSLLSKGRLI

SEQ ID NO: 94676 - protein, 15 aa, Severe acute respiratory syndrome coronavirus 2
NDMILSLLSKGRLII

SEQ ID NO: 94677 - protein, 15 aa, Severe acute respiratory syndrome coronavirus 2
DMILSLLSKGRLIIR

SEQ ID NO: 94678 - protein, 15 aa, Severe acute respiratory syndrome coronavirus 2
MILSLLSKGRLIIRE

SEQ ID NO: 94679 - protein, 15 aa, Severe acute respiratory syndrome coronavirus 2
ILSLLSKGRLIIREN

SEQ ID NO: 94680 - protein, 15 aa, Severe acute respiratory syndrome coronavirus 2
LSLLSKGRLIIRENN

SEQ ID NO: 94681 - protein, 15 aa, Severe acute respiratory syndrome coronavirus 2
SLLSKGRLIIRENNR

SEQ ID NO: 94682 - protein, 16 aa, Severe acute respiratory syndrome coronavirus 2
DEDDNLIDSYFVVKRH

SEQ ID NO: 94683 - protein, 16 aa, Severe acute respiratory syndrome coronavirus 2
EDDNLIDSYFVVKRHT

SEQ ID NO: 94684 - protein, 16 aa, Severe acute respiratory syndrome coronavirus 2
DDNLIDSYFVVKRHTF

SEQ ID NO: 94685 - protein, 16 aa, Severe acute respiratory syndrome coronavirus 2
DNLIDSYFVVKRHTFS

SEQ ID NO: 94686 - protein, 16 aa, Severe acute respiratory syndrome coronavirus 2
NLIDSYFVVKRHTFSN

SEQ ID NO: 94687 - protein, 16 aa, Severe acute respiratory syndrome coronavirus 2
LIDSYFVVKRHTFSNY

SEQ ID NO: 94688 - protein, 16 aa, Severe acute respiratory syndrome coronavirus 2
IDSYFVVKRHTFSNYQ

SEQ ID NO: 94689 - protein, 16 aa, Severe acute respiratory syndrome coronavirus 2
DSYFVVKRHTFSNYQH

SEQ ID NO: 94690 - protein, 16 aa, Severe acute respiratory syndrome coronavirus 2
SYFVVKRHTFSNYQHE

SEQ ID NO: 94691 - protein, 16 aa, Severe acute respiratory syndrome coronavirus 2
YFVVKRHTFSNYQHEE

SEQ ID NO: 94692 - protein, 16 aa, Severe acute respiratory syndrome coronavirus 2
KHDFFKFRIDGDMVPH

SEQ ID NO: 94693 - protein, 16 aa, Severe acute respiratory syndrome coronavirus 2
HDFFKFRIDGDMVPHI

SEQ ID NO: 94694 - protein, 16 aa, Severe acute respiratory syndrome coronavirus 2
DFFKFRIDGDMVPHIS

SEQ ID NO: 94695 - protein, 16 aa, Severe acute respiratory syndrome coronavirus 2
FFKFRIDGDMVPHISR

SEQ ID NO: 94696 - protein, 16 aa, Severe acute respiratory syndrome coronavirus 2
FKFRIDGDMVPHISRQ

SEQ ID NO: 94697 - protein, 16 aa, Severe acute respiratory syndrome coronavirus 2
KFRIDGDMVPHISRQR

SEQ ID NO: 94698 - protein, 16 aa, Severe acute respiratory syndrome coronavirus 2
FRIDGDMVPHISRQRL

SEQ ID NO: 94699 - protein, 16 aa, Severe acute respiratory syndrome coronavirus 2
RIDGDMVPHISRQRLT

SEQ ID NO: 94700 - protein, 16 aa, Severe acute respiratory syndrome coronavirus 2
IDGDMVPHISRQRLTK

SEQ ID NO: 94701 - protein, 16 aa, Severe acute respiratory syndrome coronavirus 2
DGDMVPHISRQRLTKY

SEQ ID NO: 94702 - protein, 16 aa, Severe acute respiratory syndrome coronavirus 2
GDMVPHISRQRLTKYT

SEQ ID NO: 94703 - protein, 16 aa, Severe acute respiratory syndrome coronavirus 2
DMVPHISRQRLTKYTM

SEQ ID NO: 94704 - protein, 16 aa, Severe acute respiratory syndrome coronavirus 2
MVPHISRQRLTKYTMA

SEQ ID NO: 94705 - protein, 16 aa, Severe acute respiratory syndrome coronavirus 2
VPHISRQRLTKYTMAD

SEQ ID NO: 94706 - protein, 16 aa, Severe acute respiratory syndrome coronavirus 2
PHISRQRLTKYTMADL

SEQ ID NO: 94707 - protein, 16 aa, Severe acute respiratory syndrome coronavirus 2
HISRQRLTKYTMADLV

SEQ ID NO: 94708 - protein, 16 aa, Severe acute respiratory syndrome coronavirus 2
ISRQRLTKYTMADLVY

SEQ ID NO: 94709 - protein, 16 aa, Severe acute respiratory syndrome coronavirus 2
SRQRLTKYTMADLVYA

SEQ ID NO: 94710 - protein, 16 aa, Severe acute respiratory syndrome coronavirus 2
RQRLTKYTMADLVYAL

SEQ ID NO: 94711 - protein, 16 aa, Severe acute respiratory syndrome coronavirus 2
QRLTKYTMADLVYALR

SEQ ID NO: 94712 - protein, 16 aa, Severe acute respiratory syndrome coronavirus 2
RLTKYTMADLVYALRH

SEQ ID NO: 94713 - protein, 16 aa, Severe acute respiratory syndrome coronavirus 2
LTKYTMADLVYALRHF

SEQ ID NO: 94714 - protein, 16 aa, Severe acute respiratory syndrome coronavirus 2
TKYTMADLVYALRHFD

SEQ ID NO: 94715 - protein, 16 aa, Severe acute respiratory syndrome coronavirus 2
KYTMADLVYALRHFDE

SEQ ID NO: 94716 - protein, 16 aa, Severe acute respiratory syndrome coronavirus 2
YTMADLVYALRHFDEG

SEQ ID NO: 94717 - protein, 16 aa, Severe acute respiratory syndrome coronavirus 2
TMADLVYALRHFDEGN

SEQ ID NO: 94718 - protein, 16 aa, Severe acute respiratory syndrome coronavirus 2
MADLVYALRHFDEGNC

SEQ ID NO: 94719 - protein, 16 aa, Severe acute respiratory syndrome coronavirus 2
ADLVYALRHFDEGNCD

SEQ ID NO: 94720 - protein, 16 aa, Severe acute respiratory syndrome coronavirus 2
LKEILVTYNCCDDDYF

SEQ ID NO: 94721 - protein, 16 aa, Severe acute respiratory syndrome coronavirus 2
KEILVTYNCCDDDYFN

SEQ ID NO: 94722 - protein, 16 aa, Severe acute respiratory syndrome coronavirus 2
EILVTYNCCDDDYFNK

SEQ ID NO: 94723 - protein, 16 aa, Severe acute respiratory syndrome coronavirus 2
VQFCDAMRNAGIVGVL

SEQ ID NO: 94724 - protein, 16 aa, Severe acute respiratory syndrome coronavirus 2
QFCDAMRNAGIVGVLT

SEQ ID NO: 94725 - protein, 16 aa, Severe acute respiratory syndrome coronavirus 2
FCDAMRNAGIVGVLTL

SEQ ID NO: 94726 - protein, 16 aa, Severe acute respiratory syndrome coronavirus 2
CDAMRNAGIVGVLTLD

SEQ ID NO: 94727 - protein, 16 aa, Severe acute respiratory syndrome coronavirus 2
DAMRNAGIVGVLTLDN

SEQ ID NO: 94728 - protein, 16 aa, Severe acute respiratory syndrome coronavirus 2
AMRNAGIVGVLTLDNQ

SEQ ID NO: 94729 - protein, 16 aa, Severe acute respiratory syndrome coronavirus 2
MRNAGIVGVLTLDNQD

SEQ ID NO: 94730 - protein, 16 aa, Severe acute respiratory syndrome coronavirus 2
RNAGIVGVLTLDNQDL

SEQ ID NO: 94731 - protein, 16 aa, Severe acute respiratory syndrome coronavirus 2
NAGIVGVLTLDNQDLN

SEQ ID NO: 94732 - protein, 16 aa, Severe acute respiratory syndrome coronavirus 2
AGIVGVLTLDNQDLNG

SEQ ID NO: 94733 - protein, 16 aa, Severe acute respiratory syndrome coronavirus 2
GIVGVLTLDNQDLNGN

SEQ ID NO: 94734 - protein, 16 aa, Severe acute respiratory syndrome coronavirus 2
IVGVLTLDNQDLNGNW

SEQ ID NO: 94735 - protein, 16 aa, Severe acute respiratory syndrome coronavirus 2
VGVLTLDNQDLNGNWY

SEQ ID NO: 94736 - protein, 16 aa, Severe acute respiratory syndrome coronavirus 2
SGVPVVDSYYSLLMPI

SEQ ID NO: 94737 - protein, 16 aa, Severe acute respiratory syndrome coronavirus 2
GVPVVDSYYSLLMPIL

SEQ ID NO: 94738 - protein, 16 aa, Severe acute respiratory syndrome coronavirus 2
VPVVDSYYSLLMPILT

SEQ ID NO: 94739 - protein, 16 aa, Severe acute respiratory syndrome coronavirus 2
PVVDSYYSLLMPILTL

SEQ ID NO: 94740 - protein, 16 aa, Severe acute respiratory syndrome coronavirus 2
VVDSYYSLLMPILTLT

SEQ ID NO: 94741 - protein, 16 aa, Severe acute respiratory syndrome coronavirus 2
VDSYYSLLMPILTLTR

SEQ ID NO: 94742 - protein, 16 aa, Severe acute respiratory syndrome coronavirus 2
ESHVDTDLTKPYIKWD

SEQ ID NO: 94743 - protein, 16 aa, Severe acute respiratory syndrome coronavirus 2
DTDLTKPYIKWDLLKY

SEQ ID NO: 94744 - protein, 16 aa, Severe acute respiratory syndrome coronavirus 2
TDLTKPYIKWDLLKYD

SEQ ID NO: 94745 - protein, 16 aa, Severe acute respiratory syndrome coronavirus 2
DLTKPYIKWDLLKYDF

SEQ ID NO: 94746 - protein, 16 aa, Severe acute respiratory syndrome coronavirus 2
LTKPYIKWDLLKYDFT

SEQ ID NO: 94747 - protein, 16 aa, Severe acute respiratory syndrome coronavirus 2
TKPYIKWDLLKYDFTE

SEQ ID NO: 94748 - protein, 16 aa, Severe acute respiratory syndrome coronavirus 2
DRCILHCANFNVLFST

SEQ ID NO: 94749 - protein, 16 aa, Severe acute respiratory syndrome coronavirus 2
RCILHCANFNVLFSTV

SEQ ID NO: 94750 - protein, 16 aa, Severe acute respiratory syndrome coronavirus 2
CILHCANFNVLFSTVF

SEQ ID NO: 94751 - protein, 16 aa, Severe acute respiratory syndrome coronavirus 2
ILHCANFNVLFSTVFP

SEQ ID NO: 94752 - protein, 16 aa, Severe acute respiratory syndrome coronavirus 2
VRKIFVDGVPFVVSTG

SEQ ID NO: 94753 - protein, 16 aa, Severe acute respiratory syndrome coronavirus 2
RKIFVDGVPFVVSTGY

SEQ ID NO: 94754 - protein, 16 aa, Severe acute respiratory syndrome coronavirus 2
KIFVDGVPFVVSTGYH

SEQ ID NO: 94755 - protein, 16 aa, Severe acute respiratory syndrome coronavirus 2
IFVDGVPFVVSTGYHF

SEQ ID NO: 94756 - protein, 16 aa, Severe acute respiratory syndrome coronavirus 2
FVDGVPFVVSTGYHFR

SEQ ID NO: 94757 - protein, 16 aa, Severe acute respiratory syndrome coronavirus 2
VDGVPFVVSTGYHFRE

SEQ ID NO: 94758 - protein, 16 aa, Severe acute respiratory syndrome coronavirus 2
DGVPFVVSTGYHFREL

SEQ ID NO: 94759 - protein, 16 aa, Severe acute respiratory syndrome coronavirus 2
GVPFVVSTGYHFRELG

SEQ ID NO: 94760 - protein, 16 aa, Severe acute respiratory syndrome coronavirus 2
VPFVVSTGYHFRELGV

SEQ ID NO: 94761 - protein, 16 aa, Severe acute respiratory syndrome coronavirus 2
PFVVSTGYHFRELGVV

SEQ ID NO: 94762 - protein, 16 aa, Severe acute respiratory syndrome coronavirus 2
FVVSTGYHFRELGVVH

SEQ ID NO: 94763 - protein, 16 aa, Severe acute respiratory syndrome coronavirus 2
VVSTGYHFRELGVVHN

SEQ ID NO: 94764 - protein, 16 aa, Severe acute respiratory syndrome coronavirus 2
HNQDVNLHSSRLSFKE

SEQ ID NO: 94765 - protein, 16 aa, Severe acute respiratory syndrome coronavirus 2
NQDVNLHSSRLSFKEL

SEQ ID NO: 94766 - protein, 16 aa, Severe acute respiratory syndrome coronavirus 2
DVNLHSSRLSFKELLV

SEQ ID NO: 94767 - protein, 16 aa, Severe acute respiratory syndrome coronavirus 2
VNLHSSRLSFKELLVY

SEQ ID NO: 94768 - protein, 16 aa, Severe acute respiratory syndrome coronavirus 2
NLHSSRLSFKELLVYA

SEQ ID NO: 94769 - protein, 16 aa, Severe acute respiratory syndrome coronavirus 2
LHSSRLSFKELLVYAA

SEQ ID NO: 94770 - protein, 16 aa, Severe acute respiratory syndrome coronavirus 2
HSSRLSFKELLVYAAD

SEQ ID NO: 94771 - protein, 16 aa, Severe acute respiratory syndrome coronavirus 2
SSRLSFKELLVYAADP

SEQ ID NO: 94772 - protein, 16 aa, Severe acute respiratory syndrome coronavirus 2
SRLSFKELLVYAADPA

SEQ ID NO: 94773 - protein, 16 aa, Severe acute respiratory syndrome coronavirus 2
TVKPGNFNKDFYDFAV

SEQ ID NO: 94774 - protein, 16 aa, Severe acute respiratory syndrome coronavirus 2
VKPGNFNKDFYDFAVS

SEQ ID NO: 94775 - protein, 16 aa, Severe acute respiratory syndrome coronavirus 2
ISDYDYYRYNLPTMCD

SEQ ID NO: 94776 - protein, 16 aa, Severe acute respiratory syndrome coronavirus 2
SDYDYYRYNLPTMCDI

SEQ ID NO: 94777 - protein, 16 aa, Severe acute respiratory syndrome coronavirus 2
DYDYYRYNLPTMCDIR

SEQ ID NO: 94778 - protein, 16 aa, Severe acute respiratory syndrome coronavirus 2
YDYYRYNLPTMCDIRQ

SEQ ID NO: 94779 - protein, 16 aa, Severe acute respiratory syndrome coronavirus 2
DYYRYNLPTMCDIRQL

SEQ ID NO: 94780 - protein, 16 aa, Severe acute respiratory syndrome coronavirus 2
YYRYNLPTMCDIRQLL

SEQ ID NO: 94781 - protein, 16 aa, Severe acute respiratory syndrome coronavirus 2
YRYNLPTMCDIRQLLF

SEQ ID NO: 94782 - protein, 16 aa, Severe acute respiratory syndrome coronavirus 2
QVIVNNLDKSAGFPFN

SEQ ID NO: 94783 - protein, 16 aa, Severe acute respiratory syndrome coronavirus 2
VIVNNLDKSAGFPFNK

SEQ ID NO: 94784 - protein, 16 aa, Severe acute respiratory syndrome coronavirus 2
IVNNLDKSAGFPFNKW

SEQ ID NO: 94785 - protein, 16 aa, Severe acute respiratory syndrome coronavirus 2
VNNLDKSAGFPFNKWG

SEQ ID NO: 94786 - protein, 16 aa, Severe acute respiratory syndrome coronavirus 2
NNLDKSAGFPFNKWGK

SEQ ID NO: 94787 - protein, 16 aa, Severe acute respiratory syndrome coronavirus 2
YTKRNVIPTITQMNLK

SEQ ID NO: 94788 - protein, 16 aa, Severe acute respiratory syndrome coronavirus 2
TKRNVIPTITQMNLKY

SEQ ID NO: 94789 - protein, 16 aa, Severe acute respiratory syndrome coronavirus 2
KRNVIPTITQMNLKYA

SEQ ID NO: 94790 - protein, 16 aa, Severe acute respiratory syndrome coronavirus 2
RNVIPTITQMNLKYAI

SEQ ID NO: 94791 - protein, 16 aa, Severe acute respiratory syndrome coronavirus 2
NVIPTITQMNLKYAIS

SEQ ID NO: 94792 - protein, 16 aa, Severe acute respiratory syndrome coronavirus 2
VIPTITQMNLKYAISA

SEQ ID NO: 94793 - protein, 16 aa, Severe acute respiratory syndrome coronavirus 2
IPTITQMNLKYAISAK

SEQ ID NO: 94794 - protein, 16 aa, Severe acute respiratory syndrome coronavirus 2
PTITQMNLKYAISAKN

SEQ ID NO: 94795 - protein, 16 aa, Severe acute respiratory syndrome coronavirus 2
TITQMNLKYAISAKNR

SEQ ID NO: 94796 - protein, 16 aa, Severe acute respiratory syndrome coronavirus 2
ITQMNLKYAISAKNRA

SEQ ID NO: 94797 - protein, 16 aa, Severe acute respiratory syndrome coronavirus 2
TQMNLKYAISAKNRAR

SEQ ID NO: 94798 - protein, 16 aa, Severe acute respiratory syndrome coronavirus 2
QMNLKYAISAKNRART

SEQ ID NO: 94799 - protein, 16 aa, Severe acute respiratory syndrome coronavirus 2
MNLKYAISAKNRARTV

SEQ ID NO: 94800 - protein, 16 aa, Severe acute respiratory syndrome coronavirus 2
NLKYAISAKNRARTVA

SEQ ID NO: 94801 - protein, 16 aa, Severe acute respiratory syndrome coronavirus 2
LKYAISAKNRARTVAG

SEQ ID NO: 94802 - protein, 16 aa, Severe acute respiratory syndrome coronavirus 2
KYAISAKNRARTVAGV

SEQ ID NO: 94803 - protein, 16 aa, Severe acute respiratory syndrome coronavirus 2
YAISAKNRARTVAGVS

SEQ ID NO: 94804 - protein, 16 aa, Severe acute respiratory syndrome coronavirus 2
AISAKNRARTVAGVSI

SEQ ID NO: 94805 - protein, 16 aa, Severe acute respiratory syndrome coronavirus 2
ISAKNRARTVAGVSIC

SEQ ID NO: 94806 - protein, 16 aa, Severe acute respiratory syndrome coronavirus 2
SAKNRARTVAGVSICS

SEQ ID NO: 94807 - protein, 16 aa, Severe acute respiratory syndrome coronavirus 2
AKNRARTVAGVSICST

SEQ ID NO: 94808 - protein, 16 aa, Severe acute respiratory syndrome coronavirus 2
KNRARTVAGVSICSTM

SEQ ID NO: 94809 - protein, 16 aa, Severe acute respiratory syndrome coronavirus 2
NRARTVAGVSICSTMT

SEQ ID NO: 94810 - protein, 16 aa, Severe acute respiratory syndrome coronavirus 2
RARTVAGVSICSTMTN

SEQ ID NO: 94811 - protein, 16 aa, Severe acute respiratory syndrome coronavirus 2
ARTVAGVSICSTMTNR

SEQ ID NO: 94812 - protein, 16 aa, Severe acute respiratory syndrome coronavirus 2
RTVAGVSICSTMTNRQ

SEQ ID NO: 94813 - protein, 16 aa, Severe acute respiratory syndrome coronavirus 2
TVAGVSICSTMTNRQF

SEQ ID NO: 94814 - protein, 16 aa, Severe acute respiratory syndrome coronavirus 2
VAGVSICSTMTNRQFH

SEQ ID NO: 94815 - protein, 16 aa, Severe acute respiratory syndrome coronavirus 2
AGVSICSTMTNRQFHQ

SEQ ID NO: 94816 - protein, 16 aa, Severe acute respiratory syndrome coronavirus 2
GVSICSTMTNRQFHQK

SEQ ID NO: 94817 - protein, 16 aa, Severe acute respiratory syndrome coronavirus 2
VSICSTMTNRQFHQKL

SEQ ID NO: 94818 - protein, 16 aa, Severe acute respiratory syndrome coronavirus 2
SICSTMTNRQFHQKLL

SEQ ID NO: 94819 - protein, 16 aa, Severe acute respiratory syndrome coronavirus 2
ICSTMTNRQFHQKLLK

SEQ ID NO: 94820 - protein, 16 aa, Severe acute respiratory syndrome coronavirus 2
CSTMTNRQFHQKLLKS

SEQ ID NO: 94821 - protein, 16 aa, Severe acute respiratory syndrome coronavirus 2
STMTNRQFHQKLLKSI

SEQ ID NO: 94822 - protein, 16 aa, Severe acute respiratory syndrome coronavirus 2
TMTNRQFHQKLLKSIA

SEQ ID NO: 94823 - protein, 16 aa, Severe acute respiratory syndrome coronavirus 2
MTNRQFHQKLLKSIAA

SEQ ID NO: 94824 - protein, 16 aa, Severe acute respiratory syndrome coronavirus 2
TNRQFHQKLLKSIAAT

SEQ ID NO: 94825 - protein, 16 aa, Severe acute respiratory syndrome coronavirus 2
NRQFHQKLLKSIAATR

SEQ ID NO: 94826 - protein, 16 aa, Severe acute respiratory syndrome coronavirus 2
RQFHQKLLKSIAATRG

SEQ ID NO: 94827 - protein, 16 aa, Severe acute respiratory syndrome coronavirus 2
QFHQKLLKSIAATRGA

SEQ ID NO: 94828 - protein, 16 aa, Severe acute respiratory syndrome coronavirus 2
FHQKLLKSIAATRGAT

SEQ ID NO: 94829 - protein, 16 aa, Severe acute respiratory syndrome coronavirus 2
IGTSKFYGGWHNMLKT

SEQ ID NO: 94830 - protein, 16 aa, Severe acute respiratory syndrome coronavirus 2
GTSKFYGGWHNMLKTV

SEQ ID NO: 94831 - protein, 16 aa, Severe acute respiratory syndrome coronavirus 2
TSKFYGGWHNMLKTVY

SEQ ID NO: 94832 - protein, 16 aa, Severe acute respiratory syndrome coronavirus 2
CGGSLYVKPGGTSSGD

SEQ ID NO: 94833 - protein, 16 aa, Severe acute respiratory syndrome coronavirus 2
GGSLYVKPGGTSSGDA

SEQ ID NO: 94834 - protein, 16 aa, Severe acute respiratory syndrome coronavirus 2
GSLYVKPGGTSSGDAT

SEQ ID NO: 94835 - protein, 16 aa, Severe acute respiratory syndrome coronavirus 2
SLYVKPGGTSSGDATT

SEQ ID NO: 94836 - protein, 16 aa, Severe acute respiratory syndrome coronavirus 2
LYVKPGGTSSGDATTA

SEQ ID NO: 94837 - protein, 16 aa, Severe acute respiratory syndrome coronavirus 2
YVKPGGTSSGDATTAY

SEQ ID NO: 94838 - protein, 16 aa, Severe acute respiratory syndrome coronavirus 2
VKPGGTSSGDATTAYA

SEQ ID NO: 94839 - protein, 16 aa, Severe acute respiratory syndrome coronavirus 2
KPGGTSSGDATTAYAN

SEQ ID NO: 94840 - protein, 16 aa, Severe acute respiratory syndrome coronavirus 2
PGGTSSGDATTAYANS

SEQ ID NO: 94841 - protein, 16 aa, Severe acute respiratory syndrome coronavirus 2
GGTSSGDATTAYANSV

SEQ ID NO: 94842 - protein, 16 aa, Severe acute respiratory syndrome coronavirus 2
GTSSGDATTAYANSVF

SEQ ID NO: 94843 - protein, 16 aa, Severe acute respiratory syndrome coronavirus 2
TSSGDATTAYANSVFN

SEQ ID NO: 94844 - protein, 16 aa, Severe acute respiratory syndrome coronavirus 2
SSGDATTAYANSVFNI

SEQ ID NO: 94845 - protein, 16 aa, Severe acute respiratory syndrome coronavirus 2
SGDATTAYANSVFNIC

SEQ ID NO: 94846 - protein, 16 aa, Severe acute respiratory syndrome coronavirus 2
GDATTAYANSVFNICQ

SEQ ID NO: 94847 - protein, 16 aa, Severe acute respiratory syndrome coronavirus 2
DATTAYANSVFNICQA

SEQ ID NO: 94848 - protein, 16 aa, Severe acute respiratory syndrome coronavirus 2
ATTAYANSVFNICQAV

SEQ ID NO: 94849 - protein, 16 aa, Severe acute respiratory syndrome coronavirus 2
TTAYANSVFNICQAVT

SEQ ID NO: 94850 - protein, 16 aa, Severe acute respiratory syndrome coronavirus 2
TAYANSVFNICQAVTA

SEQ ID NO: 94851 - protein, 16 aa, Severe acute respiratory syndrome coronavirus 2
AYANSVFNICQAVTAN

SEQ ID NO: 94852 - protein, 16 aa, Severe acute respiratory syndrome coronavirus 2
YANSVFNICQAVTANV

SEQ ID NO: 94853 - protein, 16 aa, Severe acute respiratory syndrome coronavirus 2
ANSVFNICQAVTANVN

SEQ ID NO: 94854 - protein, 16 aa, Severe acute respiratory syndrome coronavirus 2
NSVFNICQAVTANVNA

SEQ ID NO: 94855 - protein, 16 aa, Severe acute respiratory syndrome coronavirus 2
SVFNICQAVTANVNAL

SEQ ID NO: 94856 - protein, 16 aa, Severe acute respiratory syndrome coronavirus 2
VFNICQAVTANVNALL

SEQ ID NO: 94857 - protein, 16 aa, Severe acute respiratory syndrome coronavirus 2
FNICQAVTANVNALLS

SEQ ID NO: 94858 - protein, 16 aa, Severe acute respiratory syndrome coronavirus 2
NICQAVTANVNALLST

SEQ ID NO: 94859 - protein, 16 aa, Severe acute respiratory syndrome coronavirus 2
ICQAVTANVNALLSTD

SEQ ID NO: 94860 - protein, 16 aa, Severe acute respiratory syndrome coronavirus 2
CQAVTANVNALLSTDG

SEQ ID NO: 94861 - protein, 16 aa, Severe acute respiratory syndrome coronavirus 2
QAVTANVNALLSTDGN

SEQ ID NO: 94862 - protein, 16 aa, Severe acute respiratory syndrome coronavirus 2
AVTANVNALLSTDGNK

SEQ ID NO: 94863 - protein, 16 aa, Severe acute respiratory syndrome coronavirus 2
VTANVNALLSTDGNKI

SEQ ID NO: 94864 - protein, 16 aa, Severe acute respiratory syndrome coronavirus 2
TANVNALLSTDGNKIA

SEQ ID NO: 94865 - protein, 16 aa, Severe acute respiratory syndrome coronavirus 2
ANVNALLSTDGNKIAD

SEQ ID NO: 94866 - protein, 16 aa, Severe acute respiratory syndrome coronavirus 2
NVNALLSTDGNKIADK

SEQ ID NO: 94867 - protein, 16 aa, Severe acute respiratory syndrome coronavirus 2
VNALLSTDGNKIADKY

SEQ ID NO: 94868 - protein, 16 aa, Severe acute respiratory syndrome coronavirus 2
NALLSTDGNKIADKYV

SEQ ID NO: 94869 - protein, 16 aa, Severe acute respiratory syndrome coronavirus 2
ALLSTDGNKIADKYVR

SEQ ID NO: 94870 - protein, 16 aa, Severe acute respiratory syndrome coronavirus 2
GNKIADKYVRNLQHRL

SEQ ID NO: 94871 - protein, 16 aa, Severe acute respiratory syndrome coronavirus 2
NKIADKYVRNLQHRLY

SEQ ID NO: 94872 - protein, 16 aa, Severe acute respiratory syndrome coronavirus 2
KIADKYVRNLQHRLYE

SEQ ID NO: 94873 - protein, 16 aa, Severe acute respiratory syndrome coronavirus 2
IADKYVRNLQHRLYEC

SEQ ID NO: 94874 - protein, 16 aa, Severe acute respiratory syndrome coronavirus 2
ADKYVRNLQHRLYECL

SEQ ID NO: 94875 - protein, 16 aa, Severe acute respiratory syndrome coronavirus 2
DKYVRNLQHRLYECLY

SEQ ID NO: 94876 - protein, 16 aa, Severe acute respiratory syndrome coronavirus 2
KYVRNLQHRLYECLYR

SEQ ID NO: 94877 - protein, 16 aa, Severe acute respiratory syndrome coronavirus 2
FYAYLRKHFSMMILSD

SEQ ID NO: 94878 - protein, 16 aa, Severe acute respiratory syndrome coronavirus 2
YAYLRKHFSMMILSDD

SEQ ID NO: 94879 - protein, 16 aa, Severe acute respiratory syndrome coronavirus 2
AYLRKHFSMMILSDDA

SEQ ID NO: 94880 - protein, 16 aa, Severe acute respiratory syndrome coronavirus 2
YLRKHFSMMILSDDAV

SEQ ID NO: 94881 - protein, 16 aa, Severe acute respiratory syndrome coronavirus 2
LRKHFSMMILSDDAVV

SEQ ID NO: 94882 - protein, 16 aa, Severe acute respiratory syndrome coronavirus 2
RKHFSMMILSDDAVVC

SEQ ID NO: 94883 - protein, 16 aa, Severe acute respiratory syndrome coronavirus 2
KHFSMMILSDDAVVCF

SEQ ID NO: 94884 - protein, 16 aa, Severe acute respiratory syndrome coronavirus 2
LVASIKNFKSVLYYQN

SEQ ID NO: 94885 - protein, 16 aa, Severe acute respiratory syndrome coronavirus 2
VASIKNFKSVLYYQNN

SEQ ID NO: 94886 - protein, 16 aa, Severe acute respiratory syndrome coronavirus 2
ASIKNFKSVLYYQNNV

SEQ ID NO: 94887 - protein, 16 aa, Severe acute respiratory syndrome coronavirus 2
SIKNFKSVLYYQNNVF

SEQ ID NO: 94888 - protein, 16 aa, Severe acute respiratory syndrome coronavirus 2
IKNFKSVLYYQNNVFM

SEQ ID NO: 94889 - protein, 16 aa, Severe acute respiratory syndrome coronavirus 2
KNFKSVLYYQNNVFMS

SEQ ID NO: 94890 - protein, 16 aa, Severe acute respiratory syndrome coronavirus 2
NFKSVLYYQNNVFMSE

SEQ ID NO: 94891 - protein, 16 aa, Severe acute respiratory syndrome coronavirus 2
FKSVLYYQNNVFMSEA

SEQ ID NO: 94892 - protein, 16 aa, Severe acute respiratory syndrome coronavirus 2
KSVLYYQNNVFMSEAK

SEQ ID NO: 94893 - protein, 16 aa, Severe acute respiratory syndrome coronavirus 2
SVLYYQNNVFMSEAKC

SEQ ID NO: 94894 - protein, 16 aa, Severe acute respiratory syndrome coronavirus 2
VLYYQNNVFMSEAKCW

SEQ ID NO: 94895 - protein, 16 aa, Severe acute respiratory syndrome coronavirus 2
LYYQNNVFMSEAKCWT

SEQ ID NO: 94896 - protein, 16 aa, Severe acute respiratory syndrome coronavirus 2
YYQNNVFMSEAKCWTE

SEQ ID NO: 94897 - protein, 16 aa, Severe acute respiratory syndrome coronavirus 2
YQNNVFMSEAKCWTET

SEQ ID NO: 94898 - protein, 16 aa, Severe acute respiratory syndrome coronavirus 2
YPDPSRILGAGCFVDD

SEQ ID NO: 94899 - protein, 16 aa, Severe acute respiratory syndrome coronavirus 2
PDPSRILGAGCFVDDI

SEQ ID NO: 94900 - protein, 16 aa, Severe acute respiratory syndrome coronavirus 2
DPSRILGAGCFVDDIV

SEQ ID NO: 94901 - protein, 16 aa, Severe acute respiratory syndrome coronavirus 2
PSRILGAGCFVDDIVK

SEQ ID NO: 94902 - protein, 16 aa, Severe acute respiratory syndrome coronavirus 2
SRILGAGCFVDDIVKT

SEQ ID NO: 94903 - protein, 16 aa, Severe acute respiratory syndrome coronavirus 2
RILGAGCFVDDIVKTD

SEQ ID NO: 94904 - protein, 16 aa, Severe acute respiratory syndrome coronavirus 2
ILGAGCFVDDIVKTDG

SEQ ID NO: 94905 - protein, 16 aa, Severe acute respiratory syndrome coronavirus 2
GCFVDDIVKTDGTLMI

SEQ ID NO: 94906 - protein, 16 aa, Severe acute respiratory syndrome coronavirus 2
CFVDDIVKTDGTLMIE

SEQ ID NO: 94907 - protein, 16 aa, Severe acute respiratory syndrome coronavirus 2
FVDDIVKTDGTLMIER

SEQ ID NO: 94908 - protein, 16 aa, Severe acute respiratory syndrome coronavirus 2
VDDIVKTDGTLMIERF

SEQ ID NO: 94909 - protein, 16 aa, Severe acute respiratory syndrome coronavirus 2
DDIVKTDGTLMIERFV

SEQ ID NO: 94910 - protein, 16 aa, Severe acute respiratory syndrome coronavirus 2
DIVKTDGTLMIERFVS

SEQ ID NO: 94911 - protein, 16 aa, Severe acute respiratory syndrome coronavirus 2
IVKTDGTLMIERFVSL

SEQ ID NO: 94912 - protein, 16 aa, Severe acute respiratory syndrome coronavirus 2
VKTDGTLMIERFVSLA

SEQ ID NO: 94913 - protein, 16 aa, Severe acute respiratory syndrome coronavirus 2
KTDGTLMIERFVSLAI

SEQ ID NO: 94914 - protein, 16 aa, Severe acute respiratory syndrome coronavirus 2
TDGTLMIERFVSLAID

SEQ ID NO: 94915 - protein, 16 aa, Severe acute respiratory syndrome coronavirus 2
DGTLMIERFVSLAIDA

SEQ ID NO: 94916 - protein, 16 aa, Severe acute respiratory syndrome coronavirus 2
GTLMIERFVSLAIDAY

SEQ ID NO: 94917 - protein, 16 aa, Severe acute respiratory syndrome coronavirus 2
TLMIERFVSLAIDAYP

SEQ ID NO: 94918 - protein, 16 aa, Severe acute respiratory syndrome coronavirus 2
LMIERFVSLAIDAYPL

SEQ ID NO: 94919 - protein, 16 aa, Severe acute respiratory syndrome coronavirus 2
QEYADVFHLYLQYIRK

SEQ ID NO: 94920 - protein, 16 aa, Severe acute respiratory syndrome coronavirus 2
EYADVFHLYLQYIRKL

SEQ ID NO: 94921 - protein, 16 aa, Severe acute respiratory syndrome coronavirus 2
ELTGHMLDMYSVMLTN

SEQ ID NO: 94922 - protein, 16 aa, Severe acute respiratory syndrome coronavirus 2
LTGHMLDMYSVMLTND

SEQ ID NO: 94923 - protein, 16 aa, Severe acute respiratory syndrome coronavirus 2
EPEFYEAMYTPHTVLQ

SEQ ID NO: 94924 - protein, 16 aa, Severe acute respiratory syndrome coronavirus 2
TDVTQLYLGGMSYYCK

SEQ ID NO: 94925 - protein, 16 aa, Severe acute respiratory syndrome coronavirus 2
ISFPLCANGQVFGLYK

SEQ ID NO: 94926 - protein, 16 aa, Severe acute respiratory syndrome coronavirus 2
SFPLCANGQVFGLYKN

SEQ ID NO: 94927 - protein, 16 aa, Severe acute respiratory syndrome coronavirus 2
FPLCANGQVFGLYKNT

SEQ ID NO: 94928 - protein, 16 aa, Severe acute respiratory syndrome coronavirus 2
PLCANGQVFGLYKNTC

SEQ ID NO: 94929 - protein, 16 aa, Severe acute respiratory syndrome coronavirus 2
LCANGQVFGLYKNTCV

SEQ ID NO: 94930 - protein, 16 aa, Severe acute respiratory syndrome coronavirus 2
CANGQVFGLYKNTCVG

SEQ ID NO: 94931 - protein, 16 aa, Severe acute respiratory syndrome coronavirus 2
ANGQVFGLYKNTCVGS

SEQ ID NO: 94932 - protein, 16 aa, Severe acute respiratory syndrome coronavirus 2
NGQVFGLYKNTCVGSD

SEQ ID NO: 94933 - protein, 16 aa, Severe acute respiratory syndrome coronavirus 2
NAIATCDWTNAGDYIL

SEQ ID NO: 94934 - protein, 16 aa, Severe acute respiratory syndrome coronavirus 2
AIATCDWTNAGDYILA

SEQ ID NO: 94935 - protein, 16 aa, Severe acute respiratory syndrome coronavirus 2
IATCDWTNAGDYILAN

SEQ ID NO: 94936 - protein, 16 aa, Severe acute respiratory syndrome coronavirus 2
ATCDWTNAGDYILANT

SEQ ID NO: 94937 - protein, 16 aa, Severe acute respiratory syndrome coronavirus 2
TCDWTNAGDYILANTC

SEQ ID NO: 94938 - protein, 16 aa, Severe acute respiratory syndrome coronavirus 2
EETFKLSYGIATVREV

SEQ ID NO: 94939 - protein, 16 aa, Severe acute respiratory syndrome coronavirus 2
ETFKLSYGIATVREVL

SEQ ID NO: 94940 - protein, 16 aa, Severe acute respiratory syndrome coronavirus 2
TFKLSYGIATVREVLS

SEQ ID NO: 94941 - protein, 16 aa, Severe acute respiratory syndrome coronavirus 2
FKLSYGIATVREVLSD

SEQ ID NO: 94942 - protein, 16 aa, Severe acute respiratory syndrome coronavirus 2
KLSYGIATVREVLSDR

SEQ ID NO: 94943 - protein, 16 aa, Severe acute respiratory syndrome coronavirus 2
LSYGIATVREVLSDRE

SEQ ID NO: 94944 - protein, 16 aa, Severe acute respiratory syndrome coronavirus 2
SYGIATVREVLSDREL

SEQ ID NO: 94945 - protein, 16 aa, Severe acute respiratory syndrome coronavirus 2
RPPLNRNYVFTGYRVT

SEQ ID NO: 94946 - protein, 16 aa, Severe acute respiratory syndrome coronavirus 2
PPLNRNYVFTGYRVTK

SEQ ID NO: 94947 - protein, 16 aa, Severe acute respiratory syndrome coronavirus 2
PLNRNYVFTGYRVTKN

SEQ ID NO: 94948 - protein, 16 aa, Severe acute respiratory syndrome coronavirus 2
LNRNYVFTGYRVTKNS

SEQ ID NO: 94949 - protein, 16 aa, Severe acute respiratory syndrome coronavirus 2
NRNYVFTGYRVTKNSK

SEQ ID NO: 94950 - protein, 16 aa, Severe acute respiratory syndrome coronavirus 2
VYTACSHAAVDALCEK

SEQ ID NO: 94951 - protein, 16 aa, Severe acute respiratory syndrome coronavirus 2
YTACSHAAVDALCEKA

SEQ ID NO: 94952 - protein, 16 aa, Severe acute respiratory syndrome coronavirus 2
TACSHAAVDALCEKAL

SEQ ID NO: 94953 - protein, 16 aa, Severe acute respiratory syndrome coronavirus 2
ACSHAAVDALCEKALK

SEQ ID NO: 94954 - protein, 16 aa, Severe acute respiratory syndrome coronavirus 2
CSHAAVDALCEKALKY

SEQ ID NO: 94955 - protein, 16 aa, Severe acute respiratory syndrome coronavirus 2
SHAAVDALCEKALKYL

SEQ ID NO: 94956 - protein, 16 aa, Severe acute respiratory syndrome coronavirus 2
AAVDALCEKALKYLPI

SEQ ID NO: 94957 - protein, 16 aa, Severe acute respiratory syndrome coronavirus 2
AVDALCEKALKYLPID

SEQ ID NO: 94958 - protein, 16 aa, Severe acute respiratory syndrome coronavirus 2
VDALCEKALKYLPIDK

SEQ ID NO: 94959 - protein, 16 aa, Severe acute respiratory syndrome coronavirus 2
DALCEKALKYLPIDKC

SEQ ID NO: 94960 - protein, 16 aa, Severe acute respiratory syndrome coronavirus 2
ALCEKALKYLPIDKCS

SEQ ID NO: 94961 - protein, 16 aa, Severe acute respiratory syndrome coronavirus 2
LCEKALKYLPIDKCSR

SEQ ID NO: 94962 - protein, 16 aa, Severe acute respiratory syndrome coronavirus 2
CEKALKYLPIDKCSRI

SEQ ID NO: 94963 - protein, 16 aa, Severe acute respiratory syndrome coronavirus 2
EKALKYLPIDKCSRII

SEQ ID NO: 94964 - protein, 16 aa, Severe acute respiratory syndrome coronavirus 2
KALKYLPIDKCSRIIP

SEQ ID NO: 94965 - protein, 16 aa, Severe acute respiratory syndrome coronavirus 2
ALKYLPIDKCSRIIPA

SEQ ID NO: 94966 - protein, 16 aa, Severe acute respiratory syndrome coronavirus 2
LKYLPIDKCSRIIPAR

SEQ ID NO: 94967 - protein, 16 aa, Severe acute respiratory syndrome coronavirus 2
KYLPIDKCSRIIPARA

SEQ ID NO: 94968 - protein, 16 aa, Severe acute respiratory syndrome coronavirus 2
YLPIDKCSRIIPARAR

SEQ ID NO: 94969 - protein, 16 aa, Severe acute respiratory syndrome coronavirus 2
LPIDKCSRIIPARARV

SEQ ID NO: 94970 - protein, 16 aa, Severe acute respiratory syndrome coronavirus 2
PIDKCSRIIPARARVE

SEQ ID NO: 94971 - protein, 16 aa, Severe acute respiratory syndrome coronavirus 2
IDKCSRIIPARARVEC

SEQ ID NO: 94972 - protein, 16 aa, Severe acute respiratory syndrome coronavirus 2
DKCSRIIPARARVECF

SEQ ID NO: 94973 - protein, 16 aa, Severe acute respiratory syndrome coronavirus 2
KCSRIIPARARVECFD

SEQ ID NO: 94974 - protein, 16 aa, Severe acute respiratory syndrome coronavirus 2
CSRIIPARARVECFDK

SEQ ID NO: 94975 - protein, 16 aa, Severe acute respiratory syndrome coronavirus 2
SRIIPARARVECFDKF

SEQ ID NO: 94976 - protein, 16 aa, Severe acute respiratory syndrome coronavirus 2
RIIPARARVECFDKFK

SEQ ID NO: 94977 - protein, 16 aa, Severe acute respiratory syndrome coronavirus 2
HYVYIGDPAQLPAPRT

SEQ ID NO: 94978 - protein, 16 aa, Severe acute respiratory syndrome coronavirus 2
YVYIGDPAQLPAPRTL

SEQ ID NO: 94979 - protein, 16 aa, Severe acute respiratory syndrome coronavirus 2
SAINRPQIGVVREFLT

SEQ ID NO: 94980 - protein, 16 aa, Severe acute respiratory syndrome coronavirus 2
AINRPQIGVVREFLTR

SEQ ID NO: 94981 - protein, 16 aa, Severe acute respiratory syndrome coronavirus 2
INRPQIGVVREFLTRN

SEQ ID NO: 94982 - protein, 16 aa, Severe acute respiratory syndrome coronavirus 2
AWRKAVFISPYNSQNA

SEQ ID NO: 94983 - protein, 16 aa, Severe acute respiratory syndrome coronavirus 2
WRKAVFISPYNSQNAV

SEQ ID NO: 94984 - protein, 16 aa, Severe acute respiratory syndrome coronavirus 2
RKAVFISPYNSQNAVA

SEQ ID NO: 94985 - protein, 16 aa, Severe acute respiratory syndrome coronavirus 2
KAVFISPYNSQNAVAS

SEQ ID NO: 94986 - protein, 16 aa, Severe acute respiratory syndrome coronavirus 2
ETAHSCNVNRFNVAIT

SEQ ID NO: 94987 - protein, 16 aa, Severe acute respiratory syndrome coronavirus 2
TAHSCNVNRFNVAITR

SEQ ID NO: 94988 - protein, 16 aa, Severe acute respiratory syndrome coronavirus 2
SDRDLYDKLQFTSLEI

SEQ ID NO: 94989 - protein, 16 aa, Severe acute respiratory syndrome coronavirus 2
DRDLYDKLQFTSLEIP

SEQ ID NO: 94990 - protein, 16 aa, Severe acute respiratory syndrome coronavirus 2
RDLYDKLQFTSLEIPR

SEQ ID NO: 94991 - protein, 16 aa, Severe acute respiratory syndrome coronavirus 2
YDKLQFTSLEIPRRNV

SEQ ID NO: 94992 - protein, 16 aa, Severe acute respiratory syndrome coronavirus 2
LSVDTKFKTEGLCVDI

SEQ ID NO: 94993 - protein, 16 aa, Severe acute respiratory syndrome coronavirus 2
GIPKDMTYRRLISMMG

SEQ ID NO: 94994 - protein, 16 aa, Severe acute respiratory syndrome coronavirus 2
IPKDMTYRRLISMMGF

SEQ ID NO: 94995 - protein, 16 aa, Severe acute respiratory syndrome coronavirus 2
PKDMTYRRLISMMGFK

SEQ ID NO: 94996 - protein, 16 aa, Severe acute respiratory syndrome coronavirus 2
KDMTYRRLISMMGFKM

SEQ ID NO: 94997 - protein, 16 aa, Severe acute respiratory syndrome coronavirus 2
DMTYRRLISMMGFKMN

SEQ ID NO: 94998 - protein, 16 aa, Severe acute respiratory syndrome coronavirus 2
MTYRRLISMMGFKMNY

SEQ ID NO: 94999 - protein, 16 aa, Severe acute respiratory syndrome coronavirus 2
TYRRLISMMGFKMNYQ

SEQ ID NO: 95000 - protein, 16 aa, Severe acute respiratory syndrome coronavirus 2
YRRLISMMGFKMNYQV

SEQ ID NO: 95001 - protein, 16 aa, Severe acute respiratory syndrome coronavirus 2
RRLISMMGFKMNYQVN

SEQ ID NO: 95002 - protein, 16 aa, Severe acute respiratory syndrome coronavirus 2
RLISMMGFKMNYQVNG

SEQ ID NO: 95003 - protein, 16 aa, Severe acute respiratory syndrome coronavirus 2
LISMMGFKMNYQVNGY

SEQ ID NO: 95004 - protein, 16 aa, Severe acute respiratory syndrome coronavirus 2
ISMMGFKMNYQVNGYP

SEQ ID NO: 95005 - protein, 16 aa, Severe acute respiratory syndrome coronavirus 2
SMMGFKMNYQVNGYPN

SEQ ID NO: 95006 - protein, 16 aa, Severe acute respiratory syndrome coronavirus 2
MMGFKMNYQVNGYPNM

SEQ ID NO: 95007 - protein, 16 aa, Severe acute respiratory syndrome coronavirus 2
MGFKMNYQVNGYPNMF

SEQ ID NO: 95008 - protein, 16 aa, Severe acute respiratory syndrome coronavirus 2
GFKMNYQVNGYPNMFI

SEQ ID NO: 95009 - protein, 16 aa, Severe acute respiratory syndrome coronavirus 2
FKMNYQVNGYPNMFIT

SEQ ID NO: 95010 - protein, 16 aa, Severe acute respiratory syndrome coronavirus 2
KMNYQVNGYPNMFITR

SEQ ID NO: 95011 - protein, 16 aa, Severe acute respiratory syndrome coronavirus 2
MNYQVNGYPNMFITRE

SEQ ID NO: 95012 - protein, 16 aa, Severe acute respiratory syndrome coronavirus 2
NYQVNGYPNMFITREE

SEQ ID NO: 95013 - protein, 16 aa, Severe acute respiratory syndrome coronavirus 2
YQVNGYPNMFITREEA

SEQ ID NO: 95014 - protein, 16 aa, Severe acute respiratory syndrome coronavirus 2
QVNGYPNMFITREEAI

SEQ ID NO: 95015 - protein, 16 aa, Severe acute respiratory syndrome coronavirus 2
FITREEAIRHVRAWIG

SEQ ID NO: 95016 - protein, 16 aa, Severe acute respiratory syndrome coronavirus 2
ITREEAIRHVRAWIGF

SEQ ID NO: 95017 - protein, 16 aa, Severe acute respiratory syndrome coronavirus 2
TREEAIRHVRAWIGFD

SEQ ID NO: 95018 - protein, 16 aa, Severe acute respiratory syndrome coronavirus 2
RHVRAWIGFDVEGCHA

SEQ ID NO: 95019 - protein, 16 aa, Severe acute respiratory syndrome coronavirus 2
HVRAWIGFDVEGCHAT

SEQ ID NO: 95020 - protein, 16 aa, Severe acute respiratory syndrome coronavirus 2
VRAWIGFDVEGCHATR

SEQ ID NO: 95021 - protein, 16 aa, Severe acute respiratory syndrome coronavirus 2
RAWIGFDVEGCHATRE

SEQ ID NO: 95022 - protein, 16 aa, Severe acute respiratory syndrome coronavirus 2
CHATREAVGTNLPLQL

SEQ ID NO: 95023 - protein, 16 aa, Severe acute respiratory syndrome coronavirus 2
HATREAVGTNLPLQLG

SEQ ID NO: 95024 - protein, 16 aa, Severe acute respiratory syndrome coronavirus 2
ATREAVGTNLPLQLGF

SEQ ID NO: 95025 - protein, 16 aa, Severe acute respiratory syndrome coronavirus 2
TREAVGTNLPLQLGFS

SEQ ID NO: 95026 - protein, 16 aa, Severe acute respiratory syndrome coronavirus 2
PWNVVRLKIVQMLSDT

SEQ ID NO: 95027 - protein, 16 aa, Severe acute respiratory syndrome coronavirus 2
WNVVRLKIVQMLSDTL

SEQ ID NO: 95028 - protein, 16 aa, Severe acute respiratory syndrome coronavirus 2
NVVRLKIVQMLSDTLK

SEQ ID NO: 95029 - protein, 16 aa, Severe acute respiratory syndrome coronavirus 2
SDRVVFVLWAHGFELT

SEQ ID NO: 95030 - protein, 16 aa, Severe acute respiratory syndrome coronavirus 2
DRVVFVLWAHGFELTS

SEQ ID NO: 95031 - protein, 16 aa, Severe acute respiratory syndrome coronavirus 2
RVVFVLWAHGFELTSM

SEQ ID NO: 95032 - protein, 16 aa, Severe acute respiratory syndrome coronavirus 2
VVFVLWAHGFELTSMK

SEQ ID NO: 95033 - protein, 16 aa, Severe acute respiratory syndrome coronavirus 2
VFVLWAHGFELTSMKY

SEQ ID NO: 95034 - protein, 16 aa, Severe acute respiratory syndrome coronavirus 2
FVLWAHGFELTSMKYF

SEQ ID NO: 95035 - protein, 16 aa, Severe acute respiratory syndrome coronavirus 2
VLWAHGFELTSMKYFV

SEQ ID NO: 95036 - protein, 16 aa, Severe acute respiratory syndrome coronavirus 2
LWAHGFELTSMKYFVK

SEQ ID NO: 95037 - protein, 16 aa, Severe acute respiratory syndrome coronavirus 2
WAHGFELTSMKYFVKI

SEQ ID NO: 95038 - protein, 16 aa, Severe acute respiratory syndrome coronavirus 2
AHGFELTSMKYFVKIG

SEQ ID NO: 95039 - protein, 16 aa, Severe acute respiratory syndrome coronavirus 2
HGFELTSMKYFVKIGP

SEQ ID NO: 95040 - protein, 16 aa, Severe acute respiratory syndrome coronavirus 2
GFELTSMKYFVKIGPE

SEQ ID NO: 95041 - protein, 16 aa, Severe acute respiratory syndrome coronavirus 2
FELTSMKYFVKIGPER

SEQ ID NO: 95042 - protein, 16 aa, Severe acute respiratory syndrome coronavirus 2
ELTSMKYFVKIGPERT

SEQ ID NO: 95043 - protein, 16 aa, Severe acute respiratory syndrome coronavirus 2
LTSMKYFVKIGPERTC

SEQ ID NO: 95044 - protein, 16 aa, Severe acute respiratory syndrome coronavirus 2
TSMKYFVKIGPERTCC

SEQ ID NO: 95045 - protein, 16 aa, Severe acute respiratory syndrome coronavirus 2
SMKYFVKIGPERTCCL

SEQ ID NO: 95046 - protein, 16 aa, Severe acute respiratory syndrome coronavirus 2
MKYFVKIGPERTCCLC

SEQ ID NO: 95047 - protein, 16 aa, Severe acute respiratory syndrome coronavirus 2
KYFVKIGPERTCCLCD

SEQ ID NO: 95048 - protein, 16 aa, Severe acute respiratory syndrome coronavirus 2
RATCFSTASDTYACWH

SEQ ID NO: 95049 - protein, 16 aa, Severe acute respiratory syndrome coronavirus 2
ATCFSTASDTYACWHH

SEQ ID NO: 95050 - protein, 16 aa, Severe acute respiratory syndrome coronavirus 2
TCFSTASDTYACWHHS

SEQ ID NO: 95051 - protein, 16 aa, Severe acute respiratory syndrome coronavirus 2
CFSTASDTYACWHHSI

SEQ ID NO: 95052 - protein, 16 aa, Severe acute respiratory syndrome coronavirus 2
FSTASDTYACWHHSIG

SEQ ID NO: 95053 - protein, 16 aa, Severe acute respiratory syndrome coronavirus 2
NHDLYCQVHGNAHVAS

SEQ ID NO: 95054 - protein, 16 aa, Severe acute respiratory syndrome coronavirus 2
HDLYCQVHGNAHVASC

SEQ ID NO: 95055 - protein, 16 aa, Severe acute respiratory syndrome coronavirus 2
DLYCQVHGNAHVASCD

SEQ ID NO: 95056 - protein, 16 aa, Severe acute respiratory syndrome coronavirus 2
LLADKFPVLHDIGNPK

SEQ ID NO: 95057 - protein, 16 aa, Severe acute respiratory syndrome coronavirus 2
DKFPVLHDIGNPKAIK

SEQ ID NO: 95058 - protein, 16 aa, Severe acute respiratory syndrome coronavirus 2
KFPVLHDIGNPKAIKC

SEQ ID NO: 95059 - protein, 16 aa, Severe acute respiratory syndrome coronavirus 2
FPVLHDIGNPKAIKCV

SEQ ID NO: 95060 - protein, 16 aa, Severe acute respiratory syndrome coronavirus 2
GVCLFWNCNVDRYPAN

SEQ ID NO: 95061 - protein, 16 aa, Severe acute respiratory syndrome coronavirus 2
VCLFWNCNVDRYPANS

SEQ ID NO: 95062 - protein, 16 aa, Severe acute respiratory syndrome coronavirus 2
CLFWNCNVDRYPANSI

SEQ ID NO: 95063 - protein, 16 aa, Severe acute respiratory syndrome coronavirus 2
LFWNCNVDRYPANSIV

SEQ ID NO: 95064 - protein, 16 aa, Severe acute respiratory syndrome coronavirus 2
WNCNVDRYPANSIVCR

SEQ ID NO: 95065 - protein, 16 aa, Severe acute respiratory syndrome coronavirus 2
NCNVDRYPANSIVCRF

SEQ ID NO: 95066 - protein, 16 aa, Severe acute respiratory syndrome coronavirus 2
CNVDRYPANSIVCRFD

SEQ ID NO: 95067 - protein, 16 aa, Severe acute respiratory syndrome coronavirus 2
NVDRYPANSIVCRFDT

SEQ ID NO: 95068 - protein, 16 aa, Severe acute respiratory syndrome coronavirus 2
VDRYPANSIVCRFDTR

SEQ ID NO: 95069 - protein, 16 aa, Severe acute respiratory syndrome coronavirus 2
DRYPANSIVCRFDTRV

SEQ ID NO: 95070 - protein, 16 aa, Severe acute respiratory syndrome coronavirus 2
RYPANSIVCRFDTRVL

SEQ ID NO: 95071 - protein, 16 aa, Severe acute respiratory syndrome coronavirus 2
YPANSIVCRFDTRVLS

SEQ ID NO: 95072 - protein, 16 aa, Severe acute respiratory syndrome coronavirus 2
PANSIVCRFDTRVLSN

SEQ ID NO: 95073 - protein, 16 aa, Severe acute respiratory syndrome coronavirus 2
ANSIVCRFDTRVLSNL

SEQ ID NO: 95074 - protein, 16 aa, Severe acute respiratory syndrome coronavirus 2
NSIVCRFDTRVLSNLN

SEQ ID NO: 95075 - protein, 16 aa, Severe acute respiratory syndrome coronavirus 2
SIVCRFDTRVLSNLNL

SEQ ID NO: 95076 - protein, 16 aa, Severe acute respiratory syndrome coronavirus 2
GCDGGSLYVNKHAFHT

SEQ ID NO: 95077 - protein, 16 aa, Severe acute respiratory syndrome coronavirus 2
CDGGSLYVNKHAFHTP

SEQ ID NO: 95078 - protein, 16 aa, Severe acute respiratory syndrome coronavirus 2
DKSAFVNLKQLPFFYY

SEQ ID NO: 95079 - protein, 16 aa, Severe acute respiratory syndrome coronavirus 2
KSAFVNLKQLPFFYYS

SEQ ID NO: 95080 - protein, 16 aa, Severe acute respiratory syndrome coronavirus 2
SAFVNLKQLPFFYYSD

SEQ ID NO: 95081 - protein, 16 aa, Severe acute respiratory syndrome coronavirus 2
AFVNLKQLPFFYYSDS

SEQ ID NO: 95082 - protein, 16 aa, Severe acute respiratory syndrome coronavirus 2
FVNLKQLPFFYYSDSP

SEQ ID NO: 95083 - protein, 16 aa, Severe acute respiratory syndrome coronavirus 2
VNLKQLPFFYYSDSPC

SEQ ID NO: 95084 - protein, 16 aa, Severe acute respiratory syndrome coronavirus 2
NLKQLPFFYYSDSPCE

SEQ ID NO: 95085 - protein, 16 aa, Severe acute respiratory syndrome coronavirus 2
LKQLPFFYYSDSPCES

SEQ ID NO: 95086 - protein, 16 aa, Severe acute respiratory syndrome coronavirus 2
KQLPFFYYSDSPCESH

SEQ ID NO: 95087 - protein, 16 aa, Severe acute respiratory syndrome coronavirus 2
QLPFFYYSDSPCESHG

SEQ ID NO: 95088 - protein, 16 aa, Severe acute respiratory syndrome coronavirus 2
LPFFYYSDSPCESHGK

SEQ ID NO: 95089 - protein, 16 aa, Severe acute respiratory syndrome coronavirus 2
GKQVVSDIDYVPLKSA

SEQ ID NO: 95090 - protein, 16 aa, Severe acute respiratory syndrome coronavirus 2
VVSDIDYVPLKSATCI

SEQ ID NO: 95091 - protein, 16 aa, Severe acute respiratory syndrome coronavirus 2
VSDIDYVPLKSATCIT

SEQ ID NO: 95092 - protein, 16 aa, Severe acute respiratory syndrome coronavirus 2
SDIDYVPLKSATCITR

SEQ ID NO: 95093 - protein, 16 aa, Severe acute respiratory syndrome coronavirus 2
DIDYVPLKSATCITRC

SEQ ID NO: 95094 - protein, 16 aa, Severe acute respiratory syndrome coronavirus 2
IDYVPLKSATCITRCN

SEQ ID NO: 95095 - protein, 16 aa, Severe acute respiratory syndrome coronavirus 2
DYVPLKSATCITRCNL

SEQ ID NO: 95096 - protein, 16 aa, Severe acute respiratory syndrome coronavirus 2
YVPLKSATCITRCNLG

SEQ ID NO: 95097 - protein, 16 aa, Severe acute respiratory syndrome coronavirus 2
ISAGFSLWVYKQFDTY

SEQ ID NO: 95098 - protein, 16 aa, Severe acute respiratory syndrome coronavirus 2
SAGFSLWVYKQFDTYN

SEQ ID NO: 95099 - protein, 16 aa, Severe acute respiratory syndrome coronavirus 2
AGFSLWVYKQFDTYNL

SEQ ID NO: 95100 - protein, 16 aa, Severe acute respiratory syndrome coronavirus 2
GFSLWVYKQFDTYNLW

SEQ ID NO: 95101 - protein, 16 aa, Severe acute respiratory syndrome coronavirus 2
FSLWVYKQFDTYNLWN

SEQ ID NO: 95102 - protein, 16 aa, Severe acute respiratory syndrome coronavirus 2
SLWVYKQFDTYNLWNT

SEQ ID NO: 95103 - protein, 16 aa, Severe acute respiratory syndrome coronavirus 2
LWVYKQFDTYNLWNTF

SEQ ID NO: 95104 - protein, 16 aa, Severe acute respiratory syndrome coronavirus 2
WVYKQFDTYNLWNTFT

SEQ ID NO: 95105 - protein, 16 aa, Severe acute respiratory syndrome coronavirus 2
VYKQFDTYNLWNTFTR

SEQ ID NO: 95106 - protein, 16 aa, Severe acute respiratory syndrome coronavirus 2
YKQFDTYNLWNTFTRL

SEQ ID NO: 95107 - protein, 16 aa, Severe acute respiratory syndrome coronavirus 2
KQFDTYNLWNTFTRLQ

SEQ ID NO: 95108 - protein, 16 aa, Severe acute respiratory syndrome coronavirus 2
KTTLPVNVAFELWAKR

SEQ ID NO: 95109 - protein, 16 aa, Severe acute respiratory syndrome coronavirus 2
TTLPVNVAFELWAKRN

SEQ ID NO: 95110 - protein, 16 aa, Severe acute respiratory syndrome coronavirus 2
TLPVNVAFELWAKRNI

SEQ ID NO: 95111 - protein, 16 aa, Severe acute respiratory syndrome coronavirus 2
LPVNVAFELWAKRNIK

SEQ ID NO: 95112 - protein, 16 aa, Severe acute respiratory syndrome coronavirus 2
PVNVAFELWAKRNIKP

SEQ ID NO: 95113 - protein, 16 aa, Severe acute respiratory syndrome coronavirus 2
VNVAFELWAKRNIKPV

SEQ ID NO: 95114 - protein, 16 aa, Severe acute respiratory syndrome coronavirus 2
NVAFELWAKRNIKPVP

SEQ ID NO: 95115 - protein, 16 aa, Severe acute respiratory syndrome coronavirus 2
VAFELWAKRNIKPVPE

SEQ ID NO: 95116 - protein, 16 aa, Severe acute respiratory syndrome coronavirus 2
IAANTVIWDYKRDAPA

SEQ ID NO: 95117 - protein, 16 aa, Severe acute respiratory syndrome coronavirus 2
AANTVIWDYKRDAPAH

SEQ ID NO: 95118 - protein, 16 aa, Severe acute respiratory syndrome coronavirus 2
ANTVIWDYKRDAPAHI

SEQ ID NO: 95119 - protein, 16 aa, Severe acute respiratory syndrome coronavirus 2
NTVIWDYKRDAPAHIS

SEQ ID NO: 95120 - protein, 16 aa, Severe acute respiratory syndrome coronavirus 2
TVIWDYKRDAPAHIST

SEQ ID NO: 95121 - protein, 16 aa, Severe acute respiratory syndrome coronavirus 2
VIWDYKRDAPAHISTI

SEQ ID NO: 95122 - protein, 16 aa, Severe acute respiratory syndrome coronavirus 2
IWDYKRDAPAHISTIG

SEQ ID NO: 95123 - protein, 16 aa, Severe acute respiratory syndrome coronavirus 2
WDYKRDAPAHISTIGV

SEQ ID NO: 95124 - protein, 16 aa, Severe acute respiratory syndrome coronavirus 2
DYKRDAPAHISTIGVC

SEQ ID NO: 95125 - protein, 16 aa, Severe acute respiratory syndrome coronavirus 2
YKRDAPAHISTIGVCS

SEQ ID NO: 95126 - protein, 16 aa, Severe acute respiratory syndrome coronavirus 2
KRDAPAHISTIGVCSM

SEQ ID NO: 95127 - protein, 16 aa, Severe acute respiratory syndrome coronavirus 2
RDAPAHISTIGVCSMT

SEQ ID NO: 95128 - protein, 16 aa, Severe acute respiratory syndrome coronavirus 2
DAPAHISTIGVCSMTD

SEQ ID NO: 95129 - protein, 16 aa, Severe acute respiratory syndrome coronavirus 2
APAHISTIGVCSMTDI

SEQ ID NO: 95130 - protein, 16 aa, Severe acute respiratory syndrome coronavirus 2
PAHISTIGVCSMTDIA

SEQ ID NO: 95131 - protein, 16 aa, Severe acute respiratory syndrome coronavirus 2
AHISTIGVCSMTDIAK

SEQ ID NO: 95132 - protein, 16 aa, Severe acute respiratory syndrome coronavirus 2
HISTIGVCSMTDIAKK

SEQ ID NO: 95133 - protein, 16 aa, Severe acute respiratory syndrome coronavirus 2
ISTIGVCSMTDIAKKP

SEQ ID NO: 95134 - protein, 16 aa, Severe acute respiratory syndrome coronavirus 2
EGSVKGLQPSVGPKQA

SEQ ID NO: 95135 - protein, 16 aa, Severe acute respiratory syndrome coronavirus 2
GSVKGLQPSVGPKQAS

SEQ ID NO: 95136 - protein, 16 aa, Severe acute respiratory syndrome coronavirus 2
SVKGLQPSVGPKQASL

SEQ ID NO: 95137 - protein, 16 aa, Severe acute respiratory syndrome coronavirus 2
QPSVGPKQASLNGVTL

SEQ ID NO: 95138 - protein, 16 aa, Severe acute respiratory syndrome coronavirus 2
PSVGPKQASLNGVTLI

SEQ ID NO: 95139 - protein, 16 aa, Severe acute respiratory syndrome coronavirus 2
SVGPKQASLNGVTLIG

SEQ ID NO: 95140 - protein, 16 aa, Severe acute respiratory syndrome coronavirus 2
VGPKQASLNGVTLIGE

SEQ ID NO: 95141 - protein, 16 aa, Severe acute respiratory syndrome coronavirus 2
GPKQASLNGVTLIGEA

SEQ ID NO: 95142 - protein, 16 aa, Severe acute respiratory syndrome coronavirus 2
KTQFNYYKKVDGVVQQ

SEQ ID NO: 95143 - protein, 16 aa, Severe acute respiratory syndrome coronavirus 2
TQFNYYKKVDGVVQQL

SEQ ID NO: 95144 - protein, 16 aa, Severe acute respiratory syndrome coronavirus 2
QFNYYKKVDGVVQQLP

SEQ ID NO: 95145 - protein, 16 aa, Severe acute respiratory syndrome coronavirus 2
FNYYKKVDGVVQQLPE

SEQ ID NO: 95146 - protein, 16 aa, Severe acute respiratory syndrome coronavirus 2
NYYKKVDGVVQQLPET

SEQ ID NO: 95147 - protein, 16 aa, Severe acute respiratory syndrome coronavirus 2
YYKKVDGVVQQLPETY

SEQ ID NO: 95148 - protein, 16 aa, Severe acute respiratory syndrome coronavirus 2
YKKVDGVVQQLPETYF

SEQ ID NO: 95149 - protein, 16 aa, Severe acute respiratory syndrome coronavirus 2
KKVDGVVQQLPETYFT

SEQ ID NO: 95150 - protein, 16 aa, Severe acute respiratory syndrome coronavirus 2
VVQQLPETYFTQSRNL

SEQ ID NO: 95151 - protein, 16 aa, Severe acute respiratory syndrome coronavirus 2
VQQLPETYFTQSRNLQ

SEQ ID NO: 95152 - protein, 16 aa, Severe acute respiratory syndrome coronavirus 2
QQLPETYFTQSRNLQE

SEQ ID NO: 95153 - protein, 16 aa, Severe acute respiratory syndrome coronavirus 2
QLPETYFTQSRNLQEF

SEQ ID NO: 95154 - protein, 16 aa, Severe acute respiratory syndrome coronavirus 2
LPETYFTQSRNLQEFK

SEQ ID NO: 95155 - protein, 16 aa, Severe acute respiratory syndrome coronavirus 2
PETYFTQSRNLQEFKP

SEQ ID NO: 95156 - protein, 16 aa, Severe acute respiratory syndrome coronavirus 2
FSHSQLGGLHLLIGLA

SEQ ID NO: 95157 - protein, 16 aa, Severe acute respiratory syndrome coronavirus 2
SHSQLGGLHLLIGLAK

SEQ ID NO: 95158 - protein, 16 aa, Severe acute respiratory syndrome coronavirus 2
VIDLLLDDFVEIIKSQ

SEQ ID NO: 95159 - protein, 16 aa, Severe acute respiratory syndrome coronavirus 2
EIIKSQDLSVVSKVVK

SEQ ID NO: 95160 - protein, 16 aa, Severe acute respiratory syndrome coronavirus 2
TIDYTEISFMLWCKDG

SEQ ID NO: 95161 - protein, 16 aa, Severe acute respiratory syndrome coronavirus 2
SSQAWQPGVAMPNLYK

SEQ ID NO: 95162 - protein, 16 aa, Severe acute respiratory syndrome coronavirus 2
LPKGIMMNVAKYTQLC

SEQ ID NO: 95163 - protein, 16 aa, Severe acute respiratory syndrome coronavirus 2
PKGIMMNVAKYTQLCQ

SEQ ID NO: 95164 - protein, 16 aa, Severe acute respiratory syndrome coronavirus 2
KGIMMNVAKYTQLCQY

SEQ ID NO: 95165 - protein, 16 aa, Severe acute respiratory syndrome coronavirus 2
GIMMNVAKYTQLCQYL

SEQ ID NO: 95166 - protein, 16 aa, Severe acute respiratory syndrome coronavirus 2
IMMNVAKYTQLCQYLN

SEQ ID NO: 95167 - protein, 16 aa, Severe acute respiratory syndrome coronavirus 2
VAKYTQLCQYLNTLTL

SEQ ID NO: 95168 - protein, 16 aa, Severe acute respiratory syndrome coronavirus 2
AKYTQLCQYLNTLTLA

SEQ ID NO: 95169 - protein, 16 aa, Severe acute respiratory syndrome coronavirus 2
KYTQLCQYLNTLTLAV

SEQ ID NO: 95170 - protein, 16 aa, Severe acute respiratory syndrome coronavirus 2
YTQLCQYLNTLTLAVP

SEQ ID NO: 95171 - protein, 16 aa, Severe acute respiratory syndrome coronavirus 2
TQLCQYLNTLTLAVPY

SEQ ID NO: 95172 - protein, 16 aa, Severe acute respiratory syndrome coronavirus 2
QLCQYLNTLTLAVPYN

SEQ ID NO: 95173 - protein, 16 aa, Severe acute respiratory syndrome coronavirus 2
LTLAVPYNMRVIHFGA

SEQ ID NO: 95174 - protein, 16 aa, Severe acute respiratory syndrome coronavirus 2
TLAVPYNMRVIHFGAG

SEQ ID NO: 95175 - protein, 16 aa, Severe acute respiratory syndrome coronavirus 2
LAVPYNMRVIHFGAGS

SEQ ID NO: 95176 - protein, 16 aa, Severe acute respiratory syndrome coronavirus 2
AVPYNMRVIHFGAGSD

SEQ ID NO: 95177 - protein, 16 aa, Severe acute respiratory syndrome coronavirus 2
VPYNMRVIHFGAGSDK

SEQ ID NO: 95178 - protein, 16 aa, Severe acute respiratory syndrome coronavirus 2
VAPGTAVLRQWLPTGT

SEQ ID NO: 95179 - protein, 16 aa, Severe acute respiratory syndrome coronavirus 2
APGTAVLRQWLPTGTL

SEQ ID NO: 95180 - protein, 16 aa, Severe acute respiratory syndrome coronavirus 2
PGTAVLRQWLPTGTLL

SEQ ID NO: 95181 - protein, 16 aa, Severe acute respiratory syndrome coronavirus 2
GTAVLRQWLPTGTLLV

SEQ ID NO: 95182 - protein, 16 aa, Severe acute respiratory syndrome coronavirus 2
TAVLRQWLPTGTLLVD

SEQ ID NO: 95183 - protein, 16 aa, Severe acute respiratory syndrome coronavirus 2
AVLRQWLPTGTLLVDS

SEQ ID NO: 95184 - protein, 16 aa, Severe acute respiratory syndrome coronavirus 2
VLRQWLPTGTLLVDSD

SEQ ID NO: 95185 - protein, 16 aa, Severe acute respiratory syndrome coronavirus 2
LRQWLPTGTLLVDSDL

SEQ ID NO: 95186 - protein, 16 aa, Severe acute respiratory syndrome coronavirus 2
RQWLPTGTLLVDSDLN

SEQ ID NO: 95187 - protein, 16 aa, Severe acute respiratory syndrome coronavirus 2
QWLPTGTLLVDSDLND

SEQ ID NO: 95188 - protein, 16 aa, Severe acute respiratory syndrome coronavirus 2
WLPTGTLLVDSDLNDF

SEQ ID NO: 95189 - protein, 16 aa, Severe acute respiratory syndrome coronavirus 2
LPTGTLLVDSDLNDFV

SEQ ID NO: 95190 - protein, 16 aa, Severe acute respiratory syndrome coronavirus 2
PTGTLLVDSDLNDFVS

SEQ ID NO: 95191 - protein, 16 aa, Severe acute respiratory syndrome coronavirus 2
TGTLLVDSDLNDFVSD

SEQ ID NO: 95192 - protein, 16 aa, Severe acute respiratory syndrome coronavirus 2
GTLLVDSDLNDFVSDA

SEQ ID NO: 95193 - protein, 16 aa, Severe acute respiratory syndrome coronavirus 2
VHTANKWDLIISDMYD

SEQ ID NO: 95194 - protein, 16 aa, Severe acute respiratory syndrome coronavirus 2
DSKEGFFTYICGFIQQ

SEQ ID NO: 95195 - protein, 16 aa, Severe acute respiratory syndrome coronavirus 2
LALGGSVAIKITEHSW

SEQ ID NO: 95196 - protein, 16 aa, Severe acute respiratory syndrome coronavirus 2
ALGGSVAIKITEHSWN

SEQ ID NO: 95197 - protein, 16 aa, Severe acute respiratory syndrome coronavirus 2
LGGSVAIKITEHSWNA

SEQ ID NO: 95198 - protein, 16 aa, Severe acute respiratory syndrome coronavirus 2
GSVAIKITEHSWNADL

SEQ ID NO: 95199 - protein, 16 aa, Severe acute respiratory syndrome coronavirus 2
SVAIKITEHSWNADLY

SEQ ID NO: 95200 - protein, 16 aa, Severe acute respiratory syndrome coronavirus 2
AIKITEHSWNADLYKL

SEQ ID NO: 95201 - protein, 16 aa, Severe acute respiratory syndrome coronavirus 2
IKITEHSWNADLYKLM

SEQ ID NO: 95202 - protein, 16 aa, Severe acute respiratory syndrome coronavirus 2
KITEHSWNADLYKLMG

SEQ ID NO: 95203 - protein, 16 aa, Severe acute respiratory syndrome coronavirus 2
ITEHSWNADLYKLMGH

SEQ ID NO: 95204 - protein, 16 aa, Severe acute respiratory syndrome coronavirus 2
TEHSWNADLYKLMGHF

SEQ ID NO: 95205 - protein, 16 aa, Severe acute respiratory syndrome coronavirus 2
LSSYSLFDMSKFPLKL

SEQ ID NO: 95206 - protein, 16 aa, Severe acute respiratory syndrome coronavirus 2
SSYSLFDMSKFPLKLR

SEQ ID NO: 95207 - protein, 16 aa, Severe acute respiratory syndrome coronavirus 2
SYSLFDMSKFPLKLRG

SEQ ID NO: 95208 - protein, 16 aa, Severe acute respiratory syndrome coronavirus 2
YSLFDMSKFPLKLRGT

SEQ ID NO: 95209 - protein, 16 aa, Severe acute respiratory syndrome coronavirus 2
SLFDMSKFPLKLRGTA

SEQ ID NO: 95210 - protein, 16 aa, Severe acute respiratory syndrome coronavirus 2
LFDMSKFPLKLRGTAV

SEQ ID NO: 95211 - protein, 16 aa, Severe acute respiratory syndrome coronavirus 2
FDMSKFPLKLRGTAVM

SEQ ID NO: 95212 - protein, 16 aa, Severe acute respiratory syndrome coronavirus 2
DMSKFPLKLRGTAVMS

SEQ ID NO: 95213 - protein, 16 aa, Severe acute respiratory syndrome coronavirus 2
MSKFPLKLRGTAVMSL

SEQ ID NO: 95214 - protein, 16 aa, Severe acute respiratory syndrome coronavirus 2
SKFPLKLRGTAVMSLK

SEQ ID NO: 95215 - protein, 16 aa, Severe acute respiratory syndrome coronavirus 2
KFPLKLRGTAVMSLKE

SEQ ID NO: 95216 - protein, 16 aa, Severe acute respiratory syndrome coronavirus 2
QINDMILSLLSKGRLI

SEQ ID NO: 95217 - protein, 16 aa, Severe acute respiratory syndrome coronavirus 2
INDMILSLLSKGRLII

SEQ ID NO: 95218 - protein, 16 aa, Severe acute respiratory syndrome coronavirus 2
NDMILSLLSKGRLIIR

SEQ ID NO: 95219 - protein, 16 aa, Severe acute respiratory syndrome coronavirus 2
DMILSLLSKGRLIIRE

SEQ ID NO: 95220 - protein, 16 aa, Severe acute respiratory syndrome coronavirus 2
MILSLLSKGRLIIREN

SEQ ID NO: 95221 - protein, 16 aa, Severe acute respiratory syndrome coronavirus 2
ILSLLSKGRLIIRENN

SEQ ID NO: 95222 - protein, 16 aa, Severe acute respiratory syndrome coronavirus 2
LSLLSKGRLIIRENNR

SEQ ID NO: 95223 - protein, 17 aa, Severe acute respiratory syndrome coronavirus 2
DEDDNLIDSYFVVKRHT

SEQ ID NO: 95224 - protein, 17 aa, Severe acute respiratory syndrome coronavirus 2
EDDNLIDSYFVVKRHTF

SEQ ID NO: 95225 - protein, 17 aa, Severe acute respiratory syndrome coronavirus 2
DDNLIDSYFVVKRHTFS

SEQ ID NO: 95226 - protein, 17 aa, Severe acute respiratory syndrome coronavirus 2
DNLIDSYFVVKRHTFSN

SEQ ID NO: 95227 - protein, 17 aa, Severe acute respiratory syndrome coronavirus 2
NLIDSYFVVKRHTFSNY

SEQ ID NO: 95228 - protein, 17 aa, Severe acute respiratory syndrome coronavirus 2
LIDSYFVVKRHTFSNYQ

SEQ ID NO: 95229 - protein, 17 aa, Severe acute respiratory syndrome coronavirus 2
IDSYFVVKRHTFSNYQH

SEQ ID NO: 95230 - protein, 17 aa, Severe acute respiratory syndrome coronavirus 2
DSYFVVKRHTFSNYQHE

SEQ ID NO: 95231 - protein, 17 aa, Severe acute respiratory syndrome coronavirus 2
SYFVVKRHTFSNYQHEE

SEQ ID NO: 95232 - protein, 17 aa, Severe acute respiratory syndrome coronavirus 2
KHDFFKFRIDGDMVPHI

SEQ ID NO: 95233 - protein, 17 aa, Severe acute respiratory syndrome coronavirus 2
HDFFKFRIDGDMVPHIS

SEQ ID NO: 95234 - protein, 17 aa, Severe acute respiratory syndrome coronavirus 2
DFFKFRIDGDMVPHISR

SEQ ID NO: 95235 - protein, 17 aa, Severe acute respiratory syndrome coronavirus 2
FFKFRIDGDMVPHISRQ

SEQ ID NO: 95236 - protein, 17 aa, Severe acute respiratory syndrome coronavirus 2
FKFRIDGDMVPHISRQR

SEQ ID NO: 95237 - protein, 17 aa, Severe acute respiratory syndrome coronavirus 2
KFRIDGDMVPHISRQRL

SEQ ID NO: 95238 - protein, 17 aa, Severe acute respiratory syndrome coronavirus 2
FRIDGDMVPHISRQRLT

SEQ ID NO: 95239 - protein, 17 aa, Severe acute respiratory syndrome coronavirus 2
RIDGDMVPHISRQRLTK

SEQ ID NO: 95240 - protein, 17 aa, Severe acute respiratory syndrome coronavirus 2
IDGDMVPHISRQRLTKY

SEQ ID NO: 95241 - protein, 17 aa, Severe acute respiratory syndrome coronavirus 2
DGDMVPHISRQRLTKYT

SEQ ID NO: 95242 - protein, 17 aa, Severe acute respiratory syndrome coronavirus 2
GDMVPHISRQRLTKYTM

SEQ ID NO: 95243 - protein, 17 aa, Severe acute respiratory syndrome coronavirus 2
DMVPHISRQRLTKYTMA

SEQ ID NO: 95244 - protein, 17 aa, Severe acute respiratory syndrome coronavirus 2
MVPHISRQRLTKYTMAD

SEQ ID NO: 95245 - protein, 17 aa, Severe acute respiratory syndrome coronavirus 2
VPHISRQRLTKYTMADL

SEQ ID NO: 95246 - protein, 17 aa, Severe acute respiratory syndrome coronavirus 2
PHISRQRLTKYTMADLV

SEQ ID NO: 95247 - protein, 17 aa, Severe acute respiratory syndrome coronavirus 2
HISRQRLTKYTMADLVY

SEQ ID NO: 95248 - protein, 17 aa, Severe acute respiratory syndrome coronavirus 2
ISRQRLTKYTMADLVYA

SEQ ID NO: 95249 - protein, 17 aa, Severe acute respiratory syndrome coronavirus 2
SRQRLTKYTMADLVYAL

SEQ ID NO: 95250 - protein, 17 aa, Severe acute respiratory syndrome coronavirus 2
RQRLTKYTMADLVYALR

SEQ ID NO: 95251 - protein, 17 aa, Severe acute respiratory syndrome coronavirus 2
QRLTKYTMADLVYALRH

SEQ ID NO: 95252 - protein, 17 aa, Severe acute respiratory syndrome coronavirus 2
RLTKYTMADLVYALRHF

SEQ ID NO: 95253 - protein, 17 aa, Severe acute respiratory syndrome coronavirus 2
LTKYTMADLVYALRHFD

SEQ ID NO: 95254 - protein, 17 aa, Severe acute respiratory syndrome coronavirus 2
TKYTMADLVYALRHFDE

SEQ ID NO: 95255 - protein, 17 aa, Severe acute respiratory syndrome coronavirus 2
KYTMADLVYALRHFDEG

SEQ ID NO: 95256 - protein, 17 aa, Severe acute respiratory syndrome coronavirus 2
YTMADLVYALRHFDEGN

SEQ ID NO: 95257 - protein, 17 aa, Severe acute respiratory syndrome coronavirus 2
TMADLVYALRHFDEGNC

SEQ ID NO: 95258 - protein, 17 aa, Severe acute respiratory syndrome coronavirus 2
MADLVYALRHFDEGNCD

SEQ ID NO: 95259 - protein, 17 aa, Severe acute respiratory syndrome coronavirus 2
LKEILVTYNCCDDDYFN

SEQ ID NO: 95260 - protein, 17 aa, Severe acute respiratory syndrome coronavirus 2
KEILVTYNCCDDDYFNK

SEQ ID NO: 95261 - protein, 17 aa, Severe acute respiratory syndrome coronavirus 2
VQFCDAMRNAGIVGVLT

SEQ ID NO: 95262 - protein, 17 aa, Severe acute respiratory syndrome coronavirus 2
QFCDAMRNAGIVGVLTL

SEQ ID NO: 95263 - protein, 17 aa, Severe acute respiratory syndrome coronavirus 2
FCDAMRNAGIVGVLTLD

SEQ ID NO: 95264 - protein, 17 aa, Severe acute respiratory syndrome coronavirus 2
CDAMRNAGIVGVLTLDN

SEQ ID NO: 95265 - protein, 17 aa, Severe acute respiratory syndrome coronavirus 2
DAMRNAGIVGVLTLDNQ

SEQ ID NO: 95266 - protein, 17 aa, Severe acute respiratory syndrome coronavirus 2
AMRNAGIVGVLTLDNQD

SEQ ID NO: 95267 - protein, 17 aa, Severe acute respiratory syndrome coronavirus 2
MRNAGIVGVLTLDNQDL

SEQ ID NO: 95268 - protein, 17 aa, Severe acute respiratory syndrome coronavirus 2
RNAGIVGVLTLDNQDLN

SEQ ID NO: 95269 - protein, 17 aa, Severe acute respiratory syndrome coronavirus 2
NAGIVGVLTLDNQDLNG

SEQ ID NO: 95270 - protein, 17 aa, Severe acute respiratory syndrome coronavirus 2
AGIVGVLTLDNQDLNGN

SEQ ID NO: 95271 - protein, 17 aa, Severe acute respiratory syndrome coronavirus 2
GIVGVLTLDNQDLNGNW

SEQ ID NO: 95272 - protein, 17 aa, Severe acute respiratory syndrome coronavirus 2
IVGVLTLDNQDLNGNWY

SEQ ID NO: 95273 - protein, 17 aa, Severe acute respiratory syndrome coronavirus 2
VGVLTLDNQDLNGNWYD

SEQ ID NO: 95274 - protein, 17 aa, Severe acute respiratory syndrome coronavirus 2
SGVPVVDSYYSLLMPIL

SEQ ID NO: 95275 - protein, 17 aa, Severe acute respiratory syndrome coronavirus 2
GVPVVDSYYSLLMPILT

SEQ ID NO: 95276 - protein, 17 aa, Severe acute respiratory syndrome coronavirus 2
VPVVDSYYSLLMPILTL

SEQ ID NO: 95277 - protein, 17 aa, Severe acute respiratory syndrome coronavirus 2
PVVDSYYSLLMPILTLT

SEQ ID NO: 95278 - protein, 17 aa, Severe acute respiratory syndrome coronavirus 2
VVDSYYSLLMPILTLTR

SEQ ID NO: 95279 - protein, 17 aa, Severe acute respiratory syndrome coronavirus 2
ESHVDTDLTKPYIKWDL

SEQ ID NO: 95280 - protein, 17 aa, Severe acute respiratory syndrome coronavirus 2
VDTDLTKPYIKWDLLKY

SEQ ID NO: 95281 - protein, 17 aa, Severe acute respiratory syndrome coronavirus 2
DTDLTKPYIKWDLLKYD

SEQ ID NO: 95282 - protein, 17 aa, Severe acute respiratory syndrome coronavirus 2
TDLTKPYIKWDLLKYDF

SEQ ID NO: 95283 - protein, 17 aa, Severe acute respiratory syndrome coronavirus 2
DLTKPYIKWDLLKYDFT

SEQ ID NO: 95284 - protein, 17 aa, Severe acute respiratory syndrome coronavirus 2
LTKPYIKWDLLKYDFTE

SEQ ID NO: 95285 - protein, 17 aa, Severe acute respiratory syndrome coronavirus 2
DRCILHCANFNVLFSTV

SEQ ID NO: 95286 - protein, 17 aa, Severe acute respiratory syndrome coronavirus 2
RCILHCANFNVLFSTVF

SEQ ID NO: 95287 - protein, 17 aa, Severe acute respiratory syndrome coronavirus 2
CILHCANFNVLFSTVFP

SEQ ID NO: 95288 - protein, 17 aa, Severe acute respiratory syndrome coronavirus 2
VRKIFVDGVPFVVSTGY

SEQ ID NO: 95289 - protein, 17 aa, Severe acute respiratory syndrome coronavirus 2
RKIFVDGVPFVVSTGYH

SEQ ID NO: 95290 - protein, 17 aa, Severe acute respiratory syndrome coronavirus 2
KIFVDGVPFVVSTGYHF

SEQ ID NO: 95291 - protein, 17 aa, Severe acute respiratory syndrome coronavirus 2
IFVDGVPFVVSTGYHFR

SEQ ID NO: 95292 - protein, 17 aa, Severe acute respiratory syndrome coronavirus 2
FVDGVPFVVSTGYHFRE

SEQ ID NO: 95293 - protein, 17 aa, Severe acute respiratory syndrome coronavirus 2
VDGVPFVVSTGYHFREL

SEQ ID NO: 95294 - protein, 17 aa, Severe acute respiratory syndrome coronavirus 2
DGVPFVVSTGYHFRELG

SEQ ID NO: 95295 - protein, 17 aa, Severe acute respiratory syndrome coronavirus 2
GVPFVVSTGYHFRELGV

SEQ ID NO: 95296 - protein, 17 aa, Severe acute respiratory syndrome coronavirus 2
VPFVVSTGYHFRELGVV

SEQ ID NO: 95297 - protein, 17 aa, Severe acute respiratory syndrome coronavirus 2
PFVVSTGYHFRELGVVH

SEQ ID NO: 95298 - protein, 17 aa, Severe acute respiratory syndrome coronavirus 2
FVVSTGYHFRELGVVHN

SEQ ID NO: 95299 - protein, 17 aa, Severe acute respiratory syndrome coronavirus 2
HNQDVNLHSSRLSFKEL

SEQ ID NO: 95300 - protein, 17 aa, Severe acute respiratory syndrome coronavirus 2
DVNLHSSRLSFKELLVY

SEQ ID NO: 95301 - protein, 17 aa, Severe acute respiratory syndrome coronavirus 2
VNLHSSRLSFKELLVYA

SEQ ID NO: 95302 - protein, 17 aa, Severe acute respiratory syndrome coronavirus 2
NLHSSRLSFKELLVYAA

SEQ ID NO: 95303 - protein, 17 aa, Severe acute respiratory syndrome coronavirus 2
LHSSRLSFKELLVYAAD

SEQ ID NO: 95304 - protein, 17 aa, Severe acute respiratory syndrome coronavirus 2
HSSRLSFKELLVYAADP

SEQ ID NO: 95305 - protein, 17 aa, Severe acute respiratory syndrome coronavirus 2
SSRLSFKELLVYAADPA

SEQ ID NO: 95306 - protein, 17 aa, Severe acute respiratory syndrome coronavirus 2
QTVKPGNFNKDFYDFAV

SEQ ID NO: 95307 - protein, 17 aa, Severe acute respiratory syndrome coronavirus 2
TVKPGNFNKDFYDFAVS

SEQ ID NO: 95308 - protein, 17 aa, Severe acute respiratory syndrome coronavirus 2
ISDYDYYRYNLPTMCDI

SEQ ID NO: 95309 - protein, 17 aa, Severe acute respiratory syndrome coronavirus 2
SDYDYYRYNLPTMCDIR

SEQ ID NO: 95310 - protein, 17 aa, Severe acute respiratory syndrome coronavirus 2
DYDYYRYNLPTMCDIRQ

SEQ ID NO: 95311 - protein, 17 aa, Severe acute respiratory syndrome coronavirus 2
YDYYRYNLPTMCDIRQL

SEQ ID NO: 95312 - protein, 17 aa, Severe acute respiratory syndrome coronavirus 2
DYYRYNLPTMCDIRQLL

SEQ ID NO: 95313 - protein, 17 aa, Severe acute respiratory syndrome coronavirus 2
YYRYNLPTMCDIRQLLF

SEQ ID NO: 95314 - protein, 17 aa, Severe acute respiratory syndrome coronavirus 2
QVIVNNLDKSAGFPFNK

SEQ ID NO: 95315 - protein, 17 aa, Severe acute respiratory syndrome coronavirus 2
VIVNNLDKSAGFPFNKW

SEQ ID NO: 95316 - protein, 17 aa, Severe acute respiratory syndrome coronavirus 2
IVNNLDKSAGFPFNKWG

SEQ ID NO: 95317 - protein, 17 aa, Severe acute respiratory syndrome coronavirus 2
VNNLDKSAGFPFNKWGK

SEQ ID NO: 95318 - protein, 17 aa, Severe acute respiratory syndrome coronavirus 2
NNLDKSAGFPFNKWGKA

SEQ ID NO: 95319 - protein, 17 aa, Severe acute respiratory syndrome coronavirus 2
NLDKSAGFPFNKWGKAR

SEQ ID NO: 95320 - protein, 17 aa, Severe acute respiratory syndrome coronavirus 2
YTKRNVIPTITQMNLKY

SEQ ID NO: 95321 - protein, 17 aa, Severe acute respiratory syndrome coronavirus 2
TKRNVIPTITQMNLKYA

SEQ ID NO: 95322 - protein, 17 aa, Severe acute respiratory syndrome coronavirus 2
KRNVIPTITQMNLKYAI

SEQ ID NO: 95323 - protein, 17 aa, Severe acute respiratory syndrome coronavirus 2
RNVIPTITQMNLKYAIS

SEQ ID NO: 95324 - protein, 17 aa, Severe acute respiratory syndrome coronavirus 2
NVIPTITQMNLKYAISA

SEQ ID NO: 95325 - protein, 17 aa, Severe acute respiratory syndrome coronavirus 2
VIPTITQMNLKYAISAK

SEQ ID NO: 95326 - protein, 17 aa, Severe acute respiratory syndrome coronavirus 2
IPTITQMNLKYAISAKN

SEQ ID NO: 95327 - protein, 17 aa, Severe acute respiratory syndrome coronavirus 2
PTITQMNLKYAISAKNR

SEQ ID NO: 95328 - protein, 17 aa, Severe acute respiratory syndrome coronavirus 2
TITQMNLKYAISAKNRA

SEQ ID NO: 95329 - protein, 17 aa, Severe acute respiratory syndrome coronavirus 2
ITQMNLKYAISAKNRAR

SEQ ID NO: 95330 - protein, 17 aa, Severe acute respiratory syndrome coronavirus 2
TQMNLKYAISAKNRART

SEQ ID NO: 95331 - protein, 17 aa, Severe acute respiratory syndrome coronavirus 2
QMNLKYAISAKNRARTV

SEQ ID NO: 95332 - protein, 17 aa, Severe acute respiratory syndrome coronavirus 2
MNLKYAISAKNRARTVA

SEQ ID NO: 95333 - protein, 17 aa, Severe acute respiratory syndrome coronavirus 2
NLKYAISAKNRARTVAG

SEQ ID NO: 95334 - protein, 17 aa, Severe acute respiratory syndrome coronavirus 2
LKYAISAKNRARTVAGV

SEQ ID NO: 95335 - protein, 17 aa, Severe acute respiratory syndrome coronavirus 2
KYAISAKNRARTVAGVS

SEQ ID NO: 95336 - protein, 17 aa, Severe acute respiratory syndrome coronavirus 2
YAISAKNRARTVAGVSI

SEQ ID NO: 95337 - protein, 17 aa, Severe acute respiratory syndrome coronavirus 2
AISAKNRARTVAGVSIC

SEQ ID NO: 95338 - protein, 17 aa, Severe acute respiratory syndrome coronavirus 2
ISAKNRARTVAGVSICS

SEQ ID NO: 95339 - protein, 17 aa, Severe acute respiratory syndrome coronavirus 2
SAKNRARTVAGVSICST

SEQ ID NO: 95340 - protein, 17 aa, Severe acute respiratory syndrome coronavirus 2
AKNRARTVAGVSICSTM

SEQ ID NO: 95341 - protein, 17 aa, Severe acute respiratory syndrome coronavirus 2
KNRARTVAGVSICSTMT

SEQ ID NO: 95342 - protein, 17 aa, Severe acute respiratory syndrome coronavirus 2
NRARTVAGVSICSTMTN

SEQ ID NO: 95343 - protein, 17 aa, Severe acute respiratory syndrome coronavirus 2
RARTVAGVSICSTMTNR

SEQ ID NO: 95344 - protein, 17 aa, Severe acute respiratory syndrome coronavirus 2
ARTVAGVSICSTMTNRQ

SEQ ID NO: 95345 - protein, 17 aa, Severe acute respiratory syndrome coronavirus 2
RTVAGVSICSTMTNRQF

SEQ ID NO: 95346 - protein, 17 aa, Severe acute respiratory syndrome coronavirus 2
TVAGVSICSTMTNRQFH

SEQ ID NO: 95347 - protein, 17 aa, Severe acute respiratory syndrome coronavirus 2
VAGVSICSTMTNRQFHQ

SEQ ID NO: 95348 - protein, 17 aa, Severe acute respiratory syndrome coronavirus 2
AGVSICSTMTNRQFHQK

SEQ ID NO: 95349 - protein, 17 aa, Severe acute respiratory syndrome coronavirus 2
GVSICSTMTNRQFHQKL

SEQ ID NO: 95350 - protein, 17 aa, Severe acute respiratory syndrome coronavirus 2
VSICSTMTNRQFHQKLL

SEQ ID NO: 95351 - protein, 17 aa, Severe acute respiratory syndrome coronavirus 2
SICSTMTNRQFHQKLLK

SEQ ID NO: 95352 - protein, 17 aa, Severe acute respiratory syndrome coronavirus 2
ICSTMTNRQFHQKLLKS

SEQ ID NO: 95353 - protein, 17 aa, Severe acute respiratory syndrome coronavirus 2
CSTMTNRQFHQKLLKSI

SEQ ID NO: 95354 - protein, 17 aa, Severe acute respiratory syndrome coronavirus 2
STMTNRQFHQKLLKSIA

SEQ ID NO: 95355 - protein, 17 aa, Severe acute respiratory syndrome coronavirus 2
TMTNRQFHQKLLKSIAA

SEQ ID NO: 95356 - protein, 17 aa, Severe acute respiratory syndrome coronavirus 2
MTNRQFHQKLLKSIAAT

SEQ ID NO: 95357 - protein, 17 aa, Severe acute respiratory syndrome coronavirus 2
TNRQFHQKLLKSIAATR

SEQ ID NO: 95358 - protein, 17 aa, Severe acute respiratory syndrome coronavirus 2
NRQFHQKLLKSIAATRG

SEQ ID NO: 95359 - protein, 17 aa, Severe acute respiratory syndrome coronavirus 2
RQFHQKLLKSIAATRGA

SEQ ID NO: 95360 - protein, 17 aa, Severe acute respiratory syndrome coronavirus 2
QFHQKLLKSIAATRGAT

SEQ ID NO: 95361 - protein, 17 aa, Severe acute respiratory syndrome coronavirus 2
IGTSKFYGGWHNMLKTV

SEQ ID NO: 95362 - protein, 17 aa, Severe acute respiratory syndrome coronavirus 2
GTSKFYGGWHNMLKTVY

SEQ ID NO: 95363 - protein, 17 aa, Severe acute respiratory syndrome coronavirus 2
CGGSLYVKPGGTSSGDA

SEQ ID NO: 95364 - protein, 17 aa, Severe acute respiratory syndrome coronavirus 2
GGSLYVKPGGTSSGDAT

SEQ ID NO: 95365 - protein, 17 aa, Severe acute respiratory syndrome coronavirus 2
GSLYVKPGGTSSGDATT

SEQ ID NO: 95366 - protein, 17 aa, Severe acute respiratory syndrome coronavirus 2
SLYVKPGGTSSGDATTA

SEQ ID NO: 95367 - protein, 17 aa, Severe acute respiratory syndrome coronavirus 2
LYVKPGGTSSGDATTAY

SEQ ID NO: 95368 - protein, 17 aa, Severe acute respiratory syndrome coronavirus 2
YVKPGGTSSGDATTAYA

SEQ ID NO: 95369 - protein, 17 aa, Severe acute respiratory syndrome coronavirus 2
VKPGGTSSGDATTAYAN

SEQ ID NO: 95370 - protein, 17 aa, Severe acute respiratory syndrome coronavirus 2
KPGGTSSGDATTAYANS

SEQ ID NO: 95371 - protein, 17 aa, Severe acute respiratory syndrome coronavirus 2
PGGTSSGDATTAYANSV

SEQ ID NO: 95372 - protein, 17 aa, Severe acute respiratory syndrome coronavirus 2
GGTSSGDATTAYANSVF

SEQ ID NO: 95373 - protein, 17 aa, Severe acute respiratory syndrome coronavirus 2
GTSSGDATTAYANSVFN

SEQ ID NO: 95374 - protein, 17 aa, Severe acute respiratory syndrome coronavirus 2
TSSGDATTAYANSVFNI

SEQ ID NO: 95375 - protein, 17 aa, Severe acute respiratory syndrome coronavirus 2
SSGDATTAYANSVFNIC

SEQ ID NO: 95376 - protein, 17 aa, Severe acute respiratory syndrome coronavirus 2
SGDATTAYANSVFNICQ

SEQ ID NO: 95377 - protein, 17 aa, Severe acute respiratory syndrome coronavirus 2
GDATTAYANSVFNICQA

SEQ ID NO: 95378 - protein, 17 aa, Severe acute respiratory syndrome coronavirus 2
DATTAYANSVFNICQAV

SEQ ID NO: 95379 - protein, 17 aa, Severe acute respiratory syndrome coronavirus 2
ATTAYANSVFNICQAVT

SEQ ID NO: 95380 - protein, 17 aa, Severe acute respiratory syndrome coronavirus 2
TTAYANSVFNICQAVTA

SEQ ID NO: 95381 - protein, 17 aa, Severe acute respiratory syndrome coronavirus 2
TAYANSVFNICQAVTAN

SEQ ID NO: 95382 - protein, 17 aa, Severe acute respiratory syndrome coronavirus 2
AYANSVFNICQAVTANV

SEQ ID NO: 95383 - protein, 17 aa, Severe acute respiratory syndrome coronavirus 2
YANSVFNICQAVTANVN

SEQ ID NO: 95384 - protein, 17 aa, Severe acute respiratory syndrome coronavirus 2
ANSVFNICQAVTANVNA

SEQ ID NO: 95385 - protein, 17 aa, Severe acute respiratory syndrome coronavirus 2
NSVFNICQAVTANVNAL

SEQ ID NO: 95386 - protein, 17 aa, Severe acute respiratory syndrome coronavirus 2
SVFNICQAVTANVNALL

SEQ ID NO: 95387 - protein, 17 aa, Severe acute respiratory syndrome coronavirus 2
VFNICQAVTANVNALLS

SEQ ID NO: 95388 - protein, 17 aa, Severe acute respiratory syndrome coronavirus 2
FNICQAVTANVNALLST

SEQ ID NO: 95389 - protein, 17 aa, Severe acute respiratory syndrome coronavirus 2
NICQAVTANVNALLSTD

SEQ ID NO: 95390 - protein, 17 aa, Severe acute respiratory syndrome coronavirus 2
ICQAVTANVNALLSTDG

SEQ ID NO: 95391 - protein, 17 aa, Severe acute respiratory syndrome coronavirus 2
CQAVTANVNALLSTDGN

SEQ ID NO: 95392 - protein, 17 aa, Severe acute respiratory syndrome coronavirus 2
QAVTANVNALLSTDGNK

SEQ ID NO: 95393 - protein, 17 aa, Severe acute respiratory syndrome coronavirus 2
AVTANVNALLSTDGNKI

SEQ ID NO: 95394 - protein, 17 aa, Severe acute respiratory syndrome coronavirus 2
VTANVNALLSTDGNKIA

SEQ ID NO: 95395 - protein, 17 aa, Severe acute respiratory syndrome coronavirus 2
TANVNALLSTDGNKIAD

SEQ ID NO: 95396 - protein, 17 aa, Severe acute respiratory syndrome coronavirus 2
ANVNALLSTDGNKIADK

SEQ ID NO: 95397 - protein, 17 aa, Severe acute respiratory syndrome coronavirus 2
NVNALLSTDGNKIADKY

SEQ ID NO: 95398 - protein, 17 aa, Severe acute respiratory syndrome coronavirus 2
VNALLSTDGNKIADKYV

SEQ ID NO: 95399 - protein, 17 aa, Severe acute respiratory syndrome coronavirus 2
NALLSTDGNKIADKYVR

SEQ ID NO: 95400 - protein, 17 aa, Severe acute respiratory syndrome coronavirus 2
ALLSTDGNKIADKYVRN

SEQ ID NO: 95401 - protein, 17 aa, Severe acute respiratory syndrome coronavirus 2
DGNKIADKYVRNLQHRL

SEQ ID NO: 95402 - protein, 17 aa, Severe acute respiratory syndrome coronavirus 2
GNKIADKYVRNLQHRLY

SEQ ID NO: 95403 - protein, 17 aa, Severe acute respiratory syndrome coronavirus 2
NKIADKYVRNLQHRLYE

SEQ ID NO: 95404 - protein, 17 aa, Severe acute respiratory syndrome coronavirus 2
KIADKYVRNLQHRLYEC

SEQ ID NO: 95405 - protein, 17 aa, Severe acute respiratory syndrome coronavirus 2
IADKYVRNLQHRLYECL

SEQ ID NO: 95406 - protein, 17 aa, Severe acute respiratory syndrome coronavirus 2
ADKYVRNLQHRLYECLY

SEQ ID NO: 95407 - protein, 17 aa, Severe acute respiratory syndrome coronavirus 2
DKYVRNLQHRLYECLYR

SEQ ID NO: 95408 - protein, 17 aa, Severe acute respiratory syndrome coronavirus 2
FYAYLRKHFSMMILSDD

SEQ ID NO: 95409 - protein, 17 aa, Severe acute respiratory syndrome coronavirus 2
YAYLRKHFSMMILSDDA

SEQ ID NO: 95410 - protein, 17 aa, Severe acute respiratory syndrome coronavirus 2
AYLRKHFSMMILSDDAV

SEQ ID NO: 95411 - protein, 17 aa, Severe acute respiratory syndrome coronavirus 2
YLRKHFSMMILSDDAVV

SEQ ID NO: 95412 - protein, 17 aa, Severe acute respiratory syndrome coronavirus 2
LRKHFSMMILSDDAVVC

SEQ ID NO: 95413 - protein, 17 aa, Severe acute respiratory syndrome coronavirus 2
RKHFSMMILSDDAVVCF

SEQ ID NO: 95414 - protein, 17 aa, Severe acute respiratory syndrome coronavirus 2
LVASIKNFKSVLYYQNN

SEQ ID NO: 95415 - protein, 17 aa, Severe acute respiratory syndrome coronavirus 2
VASIKNFKSVLYYQNNV

SEQ ID NO: 95416 - protein, 17 aa, Severe acute respiratory syndrome coronavirus 2
ASIKNFKSVLYYQNNVF

SEQ ID NO: 95417 - protein, 17 aa, Severe acute respiratory syndrome coronavirus 2
SIKNFKSVLYYQNNVFM

SEQ ID NO: 95418 - protein, 17 aa, Severe acute respiratory syndrome coronavirus 2
IKNFKSVLYYQNNVFMS

SEQ ID NO: 95419 - protein, 17 aa, Severe acute respiratory syndrome coronavirus 2
KNFKSVLYYQNNVFMSE

SEQ ID NO: 95420 - protein, 17 aa, Severe acute respiratory syndrome coronavirus 2
NFKSVLYYQNNVFMSEA

SEQ ID NO: 95421 - protein, 17 aa, Severe acute respiratory syndrome coronavirus 2
FKSVLYYQNNVFMSEAK

SEQ ID NO: 95422 - protein, 17 aa, Severe acute respiratory syndrome coronavirus 2
KSVLYYQNNVFMSEAKC

SEQ ID NO: 95423 - protein, 17 aa, Severe acute respiratory syndrome coronavirus 2
SVLYYQNNVFMSEAKCW

SEQ ID NO: 95424 - protein, 17 aa, Severe acute respiratory syndrome coronavirus 2
VLYYQNNVFMSEAKCWT

SEQ ID NO: 95425 - protein, 17 aa, Severe acute respiratory syndrome coronavirus 2
LYYQNNVFMSEAKCWTE

SEQ ID NO: 95426 - protein, 17 aa, Severe acute respiratory syndrome coronavirus 2
YYQNNVFMSEAKCWTET

SEQ ID NO: 95427 - protein, 17 aa, Severe acute respiratory syndrome coronavirus 2
YPDPSRILGAGCFVDDI

SEQ ID NO: 95428 - protein, 17 aa, Severe acute respiratory syndrome coronavirus 2
PDPSRILGAGCFVDDIV

SEQ ID NO: 95429 - protein, 17 aa, Severe acute respiratory syndrome coronavirus 2
DPSRILGAGCFVDDIVK

SEQ ID NO: 95430 - protein, 17 aa, Severe acute respiratory syndrome coronavirus 2
PSRILGAGCFVDDIVKT

SEQ ID NO: 95431 - protein, 17 aa, Severe acute respiratory syndrome coronavirus 2
SRILGAGCFVDDIVKTD

SEQ ID NO: 95432 - protein, 17 aa, Severe acute respiratory syndrome coronavirus 2
RILGAGCFVDDIVKTDG

SEQ ID NO: 95433 - protein, 17 aa, Severe acute respiratory syndrome coronavirus 2
ILGAGCFVDDIVKTDGT

SEQ ID NO: 95434 - protein, 17 aa, Severe acute respiratory syndrome coronavirus 2
AGCFVDDIVKTDGTLMI

SEQ ID NO: 95435 - protein, 17 aa, Severe acute respiratory syndrome coronavirus 2
GCFVDDIVKTDGTLMIE

SEQ ID NO: 95436 - protein, 17 aa, Severe acute respiratory syndrome coronavirus 2
CFVDDIVKTDGTLMIER

SEQ ID NO: 95437 - protein, 17 aa, Severe acute respiratory syndrome coronavirus 2
FVDDIVKTDGTLMIERF

SEQ ID NO: 95438 - protein, 17 aa, Severe acute respiratory syndrome coronavirus 2
VDDIVKTDGTLMIERFV

SEQ ID NO: 95439 - protein, 17 aa, Severe acute respiratory syndrome coronavirus 2
DDIVKTDGTLMIERFVS

SEQ ID NO: 95440 - protein, 17 aa, Severe acute respiratory syndrome coronavirus 2
DIVKTDGTLMIERFVSL

SEQ ID NO: 95441 - protein, 17 aa, Severe acute respiratory syndrome coronavirus 2
IVKTDGTLMIERFVSLA

SEQ ID NO: 95442 - protein, 17 aa, Severe acute respiratory syndrome coronavirus 2
VKTDGTLMIERFVSLAI

SEQ ID NO: 95443 - protein, 17 aa, Severe acute respiratory syndrome coronavirus 2
KTDGTLMIERFVSLAID

SEQ ID NO: 95444 - protein, 17 aa, Severe acute respiratory syndrome coronavirus 2
TDGTLMIERFVSLAIDA

SEQ ID NO: 95445 - protein, 17 aa, Severe acute respiratory syndrome coronavirus 2
DGTLMIERFVSLAIDAY

SEQ ID NO: 95446 - protein, 17 aa, Severe acute respiratory syndrome coronavirus 2
GTLMIERFVSLAIDAYP

SEQ ID NO: 95447 - protein, 17 aa, Severe acute respiratory syndrome coronavirus 2
TLMIERFVSLAIDAYPL

SEQ ID NO: 95448 - protein, 17 aa, Severe acute respiratory syndrome coronavirus 2
QEYADVFHLYLQYIRKL

SEQ ID NO: 95449 - protein, 17 aa, Severe acute respiratory syndrome coronavirus 2
ELTGHMLDMYSVMLTND

SEQ ID NO: 95450 - protein, 17 aa, Severe acute respiratory syndrome coronavirus 2
ISFPLCANGQVFGLYKN

SEQ ID NO: 95451 - protein, 17 aa, Severe acute respiratory syndrome coronavirus 2
SFPLCANGQVFGLYKNT

SEQ ID NO: 95452 - protein, 17 aa, Severe acute respiratory syndrome coronavirus 2
FPLCANGQVFGLYKNTC

SEQ ID NO: 95453 - protein, 17 aa, Severe acute respiratory syndrome coronavirus 2
PLCANGQVFGLYKNTCV

SEQ ID NO: 95454 - protein, 17 aa, Severe acute respiratory syndrome coronavirus 2
LCANGQVFGLYKNTCVG

SEQ ID NO: 95455 - protein, 17 aa, Severe acute respiratory syndrome coronavirus 2
CANGQVFGLYKNTCVGS

SEQ ID NO: 95456 - protein, 17 aa, Severe acute respiratory syndrome coronavirus 2
ANGQVFGLYKNTCVGSD

SEQ ID NO: 95457 - protein, 17 aa, Severe acute respiratory syndrome coronavirus 2
NAIATCDWTNAGDYILA

SEQ ID NO: 95458 - protein, 17 aa, Severe acute respiratory syndrome coronavirus 2
AIATCDWTNAGDYILAN

SEQ ID NO: 95459 - protein, 17 aa, Severe acute respiratory syndrome coronavirus 2
IATCDWTNAGDYILANT

SEQ ID NO: 95460 - protein, 17 aa, Severe acute respiratory syndrome coronavirus 2
ATCDWTNAGDYILANTC

SEQ ID NO: 95461 - protein, 17 aa, Severe acute respiratory syndrome coronavirus 2
EETFKLSYGIATVREVL

SEQ ID NO: 95462 - protein, 17 aa, Severe acute respiratory syndrome coronavirus 2
ETFKLSYGIATVREVLS

SEQ ID NO: 95463 - protein, 17 aa, Severe acute respiratory syndrome coronavirus 2
TFKLSYGIATVREVLSD

SEQ ID NO: 95464 - protein, 17 aa, Severe acute respiratory syndrome coronavirus 2
FKLSYGIATVREVLSDR

SEQ ID NO: 95465 - protein, 17 aa, Severe acute respiratory syndrome coronavirus 2
KLSYGIATVREVLSDRE

SEQ ID NO: 95466 - protein, 17 aa, Severe acute respiratory syndrome coronavirus 2
LSYGIATVREVLSDREL

SEQ ID NO: 95467 - protein, 17 aa, Severe acute respiratory syndrome coronavirus 2
RPPLNRNYVFTGYRVTK

SEQ ID NO: 95468 - protein, 17 aa, Severe acute respiratory syndrome coronavirus 2
PPLNRNYVFTGYRVTKN

SEQ ID NO: 95469 - protein, 17 aa, Severe acute respiratory syndrome coronavirus 2
PLNRNYVFTGYRVTKNS

SEQ ID NO: 95470 - protein, 17 aa, Severe acute respiratory syndrome coronavirus 2
LNRNYVFTGYRVTKNSK

SEQ ID NO: 95471 - protein, 17 aa, Severe acute respiratory syndrome coronavirus 2
VYTACSHAAVDALCEKA

SEQ ID NO: 95472 - protein, 17 aa, Severe acute respiratory syndrome coronavirus 2
YTACSHAAVDALCEKAL

SEQ ID NO: 95473 - protein, 17 aa, Severe acute respiratory syndrome coronavirus 2
TACSHAAVDALCEKALK

SEQ ID NO: 95474 - protein, 17 aa, Severe acute respiratory syndrome coronavirus 2
ACSHAAVDALCEKALKY

SEQ ID NO: 95475 - protein, 17 aa, Severe acute respiratory syndrome coronavirus 2
HAAVDALCEKALKYLPI

SEQ ID NO: 95476 - protein, 17 aa, Severe acute respiratory syndrome coronavirus 2
AAVDALCEKALKYLPID

SEQ ID NO: 95477 - protein, 17 aa, Severe acute respiratory syndrome coronavirus 2
AVDALCEKALKYLPIDK

SEQ ID NO: 95478 - protein, 17 aa, Severe acute respiratory syndrome coronavirus 2
VDALCEKALKYLPIDKC

SEQ ID NO: 95479 - protein, 17 aa, Severe acute respiratory syndrome coronavirus 2
DALCEKALKYLPIDKCS

SEQ ID NO: 95480 - protein, 17 aa, Severe acute respiratory syndrome coronavirus 2
ALCEKALKYLPIDKCSR

SEQ ID NO: 95481 - protein, 17 aa, Severe acute respiratory syndrome coronavirus 2
LCEKALKYLPIDKCSRI

SEQ ID NO: 95482 - protein, 17 aa, Severe acute respiratory syndrome coronavirus 2
CEKALKYLPIDKCSRII

SEQ ID NO: 95483 - protein, 17 aa, Severe acute respiratory syndrome coronavirus 2
EKALKYLPIDKCSRIIP

SEQ ID NO: 95484 - protein, 17 aa, Severe acute respiratory syndrome coronavirus 2
KALKYLPIDKCSRIIPA

SEQ ID NO: 95485 - protein, 17 aa, Severe acute respiratory syndrome coronavirus 2
ALKYLPIDKCSRIIPAR

SEQ ID NO: 95486 - protein, 17 aa, Severe acute respiratory syndrome coronavirus 2
LKYLPIDKCSRIIPARA

SEQ ID NO: 95487 - protein, 17 aa, Severe acute respiratory syndrome coronavirus 2
KYLPIDKCSRIIPARAR

SEQ ID NO: 95488 - protein, 17 aa, Severe acute respiratory syndrome coronavirus 2
YLPIDKCSRIIPARARV

SEQ ID NO: 95489 - protein, 17 aa, Severe acute respiratory syndrome coronavirus 2
LPIDKCSRIIPARARVE

SEQ ID NO: 95490 - protein, 17 aa, Severe acute respiratory syndrome coronavirus 2
PIDKCSRIIPARARVEC

SEQ ID NO: 95491 - protein, 17 aa, Severe acute respiratory syndrome coronavirus 2
IDKCSRIIPARARVECF

SEQ ID NO: 95492 - protein, 17 aa, Severe acute respiratory syndrome coronavirus 2
DKCSRIIPARARVECFD

SEQ ID NO: 95493 - protein, 17 aa, Severe acute respiratory syndrome coronavirus 2
KCSRIIPARARVECFDK

SEQ ID NO: 95494 - protein, 17 aa, Severe acute respiratory syndrome coronavirus 2
CSRIIPARARVECFDKF

SEQ ID NO: 95495 - protein, 17 aa, Severe acute respiratory syndrome coronavirus 2
SRIIPARARVECFDKFK

SEQ ID NO: 95496 - protein, 17 aa, Severe acute respiratory syndrome coronavirus 2
HYVYIGDPAQLPAPRTL

SEQ ID NO: 95497 - protein, 17 aa, Severe acute respiratory syndrome coronavirus 2
YVYIGDPAQLPAPRTLL

SEQ ID NO: 95498 - protein, 17 aa, Severe acute respiratory syndrome coronavirus 2
SAINRPQIGVVREFLTR

SEQ ID NO: 95499 - protein, 17 aa, Severe acute respiratory syndrome coronavirus 2
AINRPQIGVVREFLTRN

SEQ ID NO: 95500 - protein, 17 aa, Severe acute respiratory syndrome coronavirus 2
AWRKAVFISPYNSQNAV

SEQ ID NO: 95501 - protein, 17 aa, Severe acute respiratory syndrome coronavirus 2
WRKAVFISPYNSQNAVA

SEQ ID NO: 95502 - protein, 17 aa, Severe acute respiratory syndrome coronavirus 2
RKAVFISPYNSQNAVAS

SEQ ID NO: 95503 - protein, 17 aa, Severe acute respiratory syndrome coronavirus 2
ETAHSCNVNRFNVAITR

SEQ ID NO: 95504 - protein, 17 aa, Severe acute respiratory syndrome coronavirus 2
SDRDLYDKLQFTSLEIP

SEQ ID NO: 95505 - protein, 17 aa, Severe acute respiratory syndrome coronavirus 2
DRDLYDKLQFTSLEIPR

SEQ ID NO: 95506 - protein, 17 aa, Severe acute respiratory syndrome coronavirus 2
GIPKDMTYRRLISMMGF

SEQ ID NO: 95507 - protein, 17 aa, Severe acute respiratory syndrome coronavirus 2
IPKDMTYRRLISMMGFK

SEQ ID NO: 95508 - protein, 17 aa, Severe acute respiratory syndrome coronavirus 2
PKDMTYRRLISMMGFKM

SEQ ID NO: 95509 - protein, 17 aa, Severe acute respiratory syndrome coronavirus 2
KDMTYRRLISMMGFKMN

SEQ ID NO: 95510 - protein, 17 aa, Severe acute respiratory syndrome coronavirus 2
DMTYRRLISMMGFKMNY

SEQ ID NO: 95511 - protein, 17 aa, Severe acute respiratory syndrome coronavirus 2
MTYRRLISMMGFKMNYQ

SEQ ID NO: 95512 - protein, 17 aa, Severe acute respiratory syndrome coronavirus 2
TYRRLISMMGFKMNYQV

SEQ ID NO: 95513 - protein, 17 aa, Severe acute respiratory syndrome coronavirus 2
YRRLISMMGFKMNYQVN

SEQ ID NO: 95514 - protein, 17 aa, Severe acute respiratory syndrome coronavirus 2
RRLISMMGFKMNYQVNG

SEQ ID NO: 95515 - protein, 17 aa, Severe acute respiratory syndrome coronavirus 2
RLISMMGFKMNYQVNGY

SEQ ID NO: 95516 - protein, 17 aa, Severe acute respiratory syndrome coronavirus 2
LISMMGFKMNYQVNGYP

SEQ ID NO: 95517 - protein, 17 aa, Severe acute respiratory syndrome coronavirus 2
ISMMGFKMNYQVNGYPN

SEQ ID NO: 95518 - protein, 17 aa, Severe acute respiratory syndrome coronavirus 2
SMMGFKMNYQVNGYPNM

SEQ ID NO: 95519 - protein, 17 aa, Severe acute respiratory syndrome coronavirus 2
MMGFKMNYQVNGYPNMF

SEQ ID NO: 95520 - protein, 17 aa, Severe acute respiratory syndrome coronavirus 2
MGFKMNYQVNGYPNMFI

SEQ ID NO: 95521 - protein, 17 aa, Severe acute respiratory syndrome coronavirus 2
GFKMNYQVNGYPNMFIT

SEQ ID NO: 95522 - protein, 17 aa, Severe acute respiratory syndrome coronavirus 2
FKMNYQVNGYPNMFITR

SEQ ID NO: 95523 - protein, 17 aa, Severe acute respiratory syndrome coronavirus 2
KMNYQVNGYPNMFITRE

SEQ ID NO: 95524 - protein, 17 aa, Severe acute respiratory syndrome coronavirus 2
MNYQVNGYPNMFITREE

SEQ ID NO: 95525 - protein, 17 aa, Severe acute respiratory syndrome coronavirus 2
NYQVNGYPNMFITREEA

SEQ ID NO: 95526 - protein, 17 aa, Severe acute respiratory syndrome coronavirus 2
YQVNGYPNMFITREEAI

SEQ ID NO: 95527 - protein, 17 aa, Severe acute respiratory syndrome coronavirus 2
FITREEAIRHVRAWIGF

SEQ ID NO: 95528 - protein, 17 aa, Severe acute respiratory syndrome coronavirus 2
ITREEAIRHVRAWIGFD

SEQ ID NO: 95529 - protein, 17 aa, Severe acute respiratory syndrome coronavirus 2
HVRAWIGFDVEGCHATR

SEQ ID NO: 95530 - protein, 17 aa, Severe acute respiratory syndrome coronavirus 2
VRAWIGFDVEGCHATRE

SEQ ID NO: 95531 - protein, 17 aa, Severe acute respiratory syndrome coronavirus 2
HATREAVGTNLPLQLGF

SEQ ID NO: 95532 - protein, 17 aa, Severe acute respiratory syndrome coronavirus 2
ATREAVGTNLPLQLGFS

SEQ ID NO: 95533 - protein, 17 aa, Severe acute respiratory syndrome coronavirus 2
PWNVVRLKIVQMLSDTL

SEQ ID NO: 95534 - protein, 17 aa, Severe acute respiratory syndrome coronavirus 2
WNVVRLKIVQMLSDTLK

SEQ ID NO: 95535 - protein, 17 aa, Severe acute respiratory syndrome coronavirus 2
SDRVVFVLWAHGFELTS

SEQ ID NO: 95536 - protein, 17 aa, Severe acute respiratory syndrome coronavirus 2
DRVVFVLWAHGFELTSM

SEQ ID NO: 95537 - protein, 17 aa, Severe acute respiratory syndrome coronavirus 2
RVVFVLWAHGFELTSMK

SEQ ID NO: 95538 - protein, 17 aa, Severe acute respiratory syndrome coronavirus 2
VVFVLWAHGFELTSMKY

SEQ ID NO: 95539 - protein, 17 aa, Severe acute respiratory syndrome coronavirus 2
VFVLWAHGFELTSMKYF

SEQ ID NO: 95540 - protein, 17 aa, Severe acute respiratory syndrome coronavirus 2
FVLWAHGFELTSMKYFV

SEQ ID NO: 95541 - protein, 17 aa, Severe acute respiratory syndrome coronavirus 2
VLWAHGFELTSMKYFVK

SEQ ID NO: 95542 - protein, 17 aa, Severe acute respiratory syndrome coronavirus 2
LWAHGFELTSMKYFVKI

SEQ ID NO: 95543 - protein, 17 aa, Severe acute respiratory syndrome coronavirus 2
WAHGFELTSMKYFVKIG

SEQ ID NO: 95544 - protein, 17 aa, Severe acute respiratory syndrome coronavirus 2
AHGFELTSMKYFVKIGP

SEQ ID NO: 95545 - protein, 17 aa, Severe acute respiratory syndrome coronavirus 2
HGFELTSMKYFVKIGPE

SEQ ID NO: 95546 - protein, 17 aa, Severe acute respiratory syndrome coronavirus 2
GFELTSMKYFVKIGPER

SEQ ID NO: 95547 - protein, 17 aa, Severe acute respiratory syndrome coronavirus 2
FELTSMKYFVKIGPERT

SEQ ID NO: 95548 - protein, 17 aa, Severe acute respiratory syndrome coronavirus 2
ELTSMKYFVKIGPERTC

SEQ ID NO: 95549 - protein, 17 aa, Severe acute respiratory syndrome coronavirus 2
LTSMKYFVKIGPERTCC

SEQ ID NO: 95550 - protein, 17 aa, Severe acute respiratory syndrome coronavirus 2
TSMKYFVKIGPERTCCL

SEQ ID NO: 95551 - protein, 17 aa, Severe acute respiratory syndrome coronavirus 2
SMKYFVKIGPERTCCLC

SEQ ID NO: 95552 - protein, 17 aa, Severe acute respiratory syndrome coronavirus 2
MKYFVKIGPERTCCLCD

SEQ ID NO: 95553 - protein, 17 aa, Severe acute respiratory syndrome coronavirus 2
RATCFSTASDTYACWHH

SEQ ID NO: 95554 - protein, 17 aa, Severe acute respiratory syndrome coronavirus 2
ATCFSTASDTYACWHHS

SEQ ID NO: 95555 - protein, 17 aa, Severe acute respiratory syndrome coronavirus 2
TCFSTASDTYACWHHSI

SEQ ID NO: 95556 - protein, 17 aa, Severe acute respiratory syndrome coronavirus 2
NHDLYCQVHGNAHVASC

SEQ ID NO: 95557 - protein, 17 aa, Severe acute respiratory syndrome coronavirus 2
HDLYCQVHGNAHVASCD

SEQ ID NO: 95558 - protein, 17 aa, Severe acute respiratory syndrome coronavirus 2
DKFPVLHDIGNPKAIKC

SEQ ID NO: 95559 - protein, 17 aa, Severe acute respiratory syndrome coronavirus 2
KFPVLHDIGNPKAIKCV

SEQ ID NO: 95560 - protein, 17 aa, Severe acute respiratory syndrome coronavirus 2
FPVLHDIGNPKAIKCVP

SEQ ID NO: 95561 - protein, 17 aa, Severe acute respiratory syndrome coronavirus 2
GVCLFWNCNVDRYPANS

SEQ ID NO: 95562 - protein, 17 aa, Severe acute respiratory syndrome coronavirus 2
VCLFWNCNVDRYPANSI

SEQ ID NO: 95563 - protein, 17 aa, Severe acute respiratory syndrome coronavirus 2
CLFWNCNVDRYPANSIV

SEQ ID NO: 95564 - protein, 17 aa, Severe acute respiratory syndrome coronavirus 2
LFWNCNVDRYPANSIVC

SEQ ID NO: 95565 - protein, 17 aa, Severe acute respiratory syndrome coronavirus 2
FWNCNVDRYPANSIVCR

SEQ ID NO: 95566 - protein, 17 aa, Severe acute respiratory syndrome coronavirus 2
WNCNVDRYPANSIVCRF

SEQ ID NO: 95567 - protein, 17 aa, Severe acute respiratory syndrome coronavirus 2
NCNVDRYPANSIVCRFD

SEQ ID NO: 95568 - protein, 17 aa, Severe acute respiratory syndrome coronavirus 2
CNVDRYPANSIVCRFDT

SEQ ID NO: 95569 - protein, 17 aa, Severe acute respiratory syndrome coronavirus 2
NVDRYPANSIVCRFDTR

SEQ ID NO: 95570 - protein, 17 aa, Severe acute respiratory syndrome coronavirus 2
VDRYPANSIVCRFDTRV

SEQ ID NO: 95571 - protein, 17 aa, Severe acute respiratory syndrome coronavirus 2
DRYPANSIVCRFDTRVL

SEQ ID NO: 95572 - protein, 17 aa, Severe acute respiratory syndrome coronavirus 2
RYPANSIVCRFDTRVLS

SEQ ID NO: 95573 - protein, 17 aa, Severe acute respiratory syndrome coronavirus 2
YPANSIVCRFDTRVLSN

SEQ ID NO: 95574 - protein, 17 aa, Severe acute respiratory syndrome coronavirus 2
PANSIVCRFDTRVLSNL

SEQ ID NO: 95575 - protein, 17 aa, Severe acute respiratory syndrome coronavirus 2
ANSIVCRFDTRVLSNLN

SEQ ID NO: 95576 - protein, 17 aa, Severe acute respiratory syndrome coronavirus 2
NSIVCRFDTRVLSNLNL

SEQ ID NO: 95577 - protein, 17 aa, Severe acute respiratory syndrome coronavirus 2
GCDGGSLYVNKHAFHTP

SEQ ID NO: 95578 - protein, 17 aa, Severe acute respiratory syndrome coronavirus 2
DKSAFVNLKQLPFFYYS

SEQ ID NO: 95579 - protein, 17 aa, Severe acute respiratory syndrome coronavirus 2
KSAFVNLKQLPFFYYSD

SEQ ID NO: 95580 - protein, 17 aa, Severe acute respiratory syndrome coronavirus 2
SAFVNLKQLPFFYYSDS

SEQ ID NO: 95581 - protein, 17 aa, Severe acute respiratory syndrome coronavirus 2
AFVNLKQLPFFYYSDSP

SEQ ID NO: 95582 - protein, 17 aa, Severe acute respiratory syndrome coronavirus 2
FVNLKQLPFFYYSDSPC

SEQ ID NO: 95583 - protein, 17 aa, Severe acute respiratory syndrome coronavirus 2
VNLKQLPFFYYSDSPCE

SEQ ID NO: 95584 - protein, 17 aa, Severe acute respiratory syndrome coronavirus 2
NLKQLPFFYYSDSPCES

SEQ ID NO: 95585 - protein, 17 aa, Severe acute respiratory syndrome coronavirus 2
LKQLPFFYYSDSPCESH

SEQ ID NO: 95586 - protein, 17 aa, Severe acute respiratory syndrome coronavirus 2
KQLPFFYYSDSPCESHG

SEQ ID NO: 95587 - protein, 17 aa, Severe acute respiratory syndrome coronavirus 2
QLPFFYYSDSPCESHGK

SEQ ID NO: 95588 - protein, 17 aa, Severe acute respiratory syndrome coronavirus 2
VVSDIDYVPLKSATCIT

SEQ ID NO: 95589 - protein, 17 aa, Severe acute respiratory syndrome coronavirus 2
VSDIDYVPLKSATCITR

SEQ ID NO: 95590 - protein, 17 aa, Severe acute respiratory syndrome coronavirus 2
SDIDYVPLKSATCITRC

SEQ ID NO: 95591 - protein, 17 aa, Severe acute respiratory syndrome coronavirus 2
DIDYVPLKSATCITRCN

SEQ ID NO: 95592 - protein, 17 aa, Severe acute respiratory syndrome coronavirus 2
IDYVPLKSATCITRCNL

SEQ ID NO: 95593 - protein, 17 aa, Severe acute respiratory syndrome coronavirus 2
DYVPLKSATCITRCNLG

SEQ ID NO: 95594 - protein, 17 aa, Severe acute respiratory syndrome coronavirus 2
YVPLKSATCITRCNLGG

SEQ ID NO: 95595 - protein, 17 aa, Severe acute respiratory syndrome coronavirus 2
ISAGFSLWVYKQFDTYN

SEQ ID NO: 95596 - protein, 17 aa, Severe acute respiratory syndrome coronavirus 2
SAGFSLWVYKQFDTYNL

SEQ ID NO: 95597 - protein, 17 aa, Severe acute respiratory syndrome coronavirus 2
AGFSLWVYKQFDTYNLW

SEQ ID NO: 95598 - protein, 17 aa, Severe acute respiratory syndrome coronavirus 2
GFSLWVYKQFDTYNLWN

SEQ ID NO: 95599 - protein, 17 aa, Severe acute respiratory syndrome coronavirus 2
FSLWVYKQFDTYNLWNT

SEQ ID NO: 95600 - protein, 17 aa, Severe acute respiratory syndrome coronavirus 2
SLWVYKQFDTYNLWNTF

SEQ ID NO: 95601 - protein, 17 aa, Severe acute respiratory syndrome coronavirus 2
LWVYKQFDTYNLWNTFT

SEQ ID NO: 95602 - protein, 17 aa, Severe acute respiratory syndrome coronavirus 2
WVYKQFDTYNLWNTFTR

SEQ ID NO: 95603 - protein, 17 aa, Severe acute respiratory syndrome coronavirus 2
VYKQFDTYNLWNTFTRL

SEQ ID NO: 95604 - protein, 17 aa, Severe acute respiratory syndrome coronavirus 2
YKQFDTYNLWNTFTRLQ

SEQ ID NO: 95605 - protein, 17 aa, Severe acute respiratory syndrome coronavirus 2
KTTLPVNVAFELWAKRN

SEQ ID NO: 95606 - protein, 17 aa, Severe acute respiratory syndrome coronavirus 2
TTLPVNVAFELWAKRNI

SEQ ID NO: 95607 - protein, 17 aa, Severe acute respiratory syndrome coronavirus 2
TLPVNVAFELWAKRNIK

SEQ ID NO: 95608 - protein, 17 aa, Severe acute respiratory syndrome coronavirus 2
LPVNVAFELWAKRNIKP

SEQ ID NO: 95609 - protein, 17 aa, Severe acute respiratory syndrome coronavirus 2
PVNVAFELWAKRNIKPV

SEQ ID NO: 95610 - protein, 17 aa, Severe acute respiratory syndrome coronavirus 2
VNVAFELWAKRNIKPVP

SEQ ID NO: 95611 - protein, 17 aa, Severe acute respiratory syndrome coronavirus 2
NVAFELWAKRNIKPVPE

SEQ ID NO: 95612 - protein, 17 aa, Severe acute respiratory syndrome coronavirus 2
IAANTVIWDYKRDAPAH

SEQ ID NO: 95613 - protein, 17 aa, Severe acute respiratory syndrome coronavirus 2
AANTVIWDYKRDAPAHI

SEQ ID NO: 95614 - protein, 17 aa, Severe acute respiratory syndrome coronavirus 2
ANTVIWDYKRDAPAHIS

SEQ ID NO: 95615 - protein, 17 aa, Severe acute respiratory syndrome coronavirus 2
NTVIWDYKRDAPAHIST

SEQ ID NO: 95616 - protein, 17 aa, Severe acute respiratory syndrome coronavirus 2
TVIWDYKRDAPAHISTI

SEQ ID NO: 95617 - protein, 17 aa, Severe acute respiratory syndrome coronavirus 2
VIWDYKRDAPAHISTIG

SEQ ID NO: 95618 - protein, 17 aa, Severe acute respiratory syndrome coronavirus 2
IWDYKRDAPAHISTIGV

SEQ ID NO: 95619 - protein, 17 aa, Severe acute respiratory syndrome coronavirus 2
WDYKRDAPAHISTIGVC

SEQ ID NO: 95620 - protein, 17 aa, Severe acute respiratory syndrome coronavirus 2
DYKRDAPAHISTIGVCS

SEQ ID NO: 95621 - protein, 17 aa, Severe acute respiratory syndrome coronavirus 2
YKRDAPAHISTIGVCSM

SEQ ID NO: 95622 - protein, 17 aa, Severe acute respiratory syndrome coronavirus 2
KRDAPAHISTIGVCSMT

SEQ ID NO: 95623 - protein, 17 aa, Severe acute respiratory syndrome coronavirus 2
RDAPAHISTIGVCSMTD

SEQ ID NO: 95624 - protein, 17 aa, Severe acute respiratory syndrome coronavirus 2
DAPAHISTIGVCSMTDI

SEQ ID NO: 95625 - protein, 17 aa, Severe acute respiratory syndrome coronavirus 2
APAHISTIGVCSMTDIA

SEQ ID NO: 95626 - protein, 17 aa, Severe acute respiratory syndrome coronavirus 2
PAHISTIGVCSMTDIAK

SEQ ID NO: 95627 - protein, 17 aa, Severe acute respiratory syndrome coronavirus 2
AHISTIGVCSMTDIAKK

SEQ ID NO: 95628 - protein, 17 aa, Severe acute respiratory syndrome coronavirus 2
HISTIGVCSMTDIAKKP

SEQ ID NO: 95629 - protein, 17 aa, Severe acute respiratory syndrome coronavirus 2
ISTIGVCSMTDIAKKPT

SEQ ID NO: 95630 - protein, 17 aa, Severe acute respiratory syndrome coronavirus 2
EGSVKGLQPSVGPKQAS

SEQ ID NO: 95631 - protein, 17 aa, Severe acute respiratory syndrome coronavirus 2
GSVKGLQPSVGPKQASL

SEQ ID NO: 95632 - protein, 17 aa, Severe acute respiratory syndrome coronavirus 2
SVKGLQPSVGPKQASLN

SEQ ID NO: 95633 - protein, 17 aa, Severe acute respiratory syndrome coronavirus 2
QPSVGPKQASLNGVTLI

SEQ ID NO: 95634 - protein, 17 aa, Severe acute respiratory syndrome coronavirus 2
PSVGPKQASLNGVTLIG

SEQ ID NO: 95635 - protein, 17 aa, Severe acute respiratory syndrome coronavirus 2
SVGPKQASLNGVTLIGE

SEQ ID NO: 95636 - protein, 17 aa, Severe acute respiratory syndrome coronavirus 2
VGPKQASLNGVTLIGEA

SEQ ID NO: 95637 - protein, 17 aa, Severe acute respiratory syndrome coronavirus 2
KTQFNYYKKVDGVVQQL

SEQ ID NO: 95638 - protein, 17 aa, Severe acute respiratory syndrome coronavirus 2
TQFNYYKKVDGVVQQLP

SEQ ID NO: 95639 - protein, 17 aa, Severe acute respiratory syndrome coronavirus 2
QFNYYKKVDGVVQQLPE

SEQ ID NO: 95640 - protein, 17 aa, Severe acute respiratory syndrome coronavirus 2
FNYYKKVDGVVQQLPET

SEQ ID NO: 95641 - protein, 17 aa, Severe acute respiratory syndrome coronavirus 2
NYYKKVDGVVQQLPETY

SEQ ID NO: 95642 - protein, 17 aa, Severe acute respiratory syndrome coronavirus 2
YYKKVDGVVQQLPETYF

SEQ ID NO: 95643 - protein, 17 aa, Severe acute respiratory syndrome coronavirus 2
YKKVDGVVQQLPETYFT

SEQ ID NO: 95644 - protein, 17 aa, Severe acute respiratory syndrome coronavirus 2
KKVDGVVQQLPETYFTQ

SEQ ID NO: 95645 - protein, 17 aa, Severe acute respiratory syndrome coronavirus 2
GVVQQLPETYFTQSRNL

SEQ ID NO: 95646 - protein, 17 aa, Severe acute respiratory syndrome coronavirus 2
VVQQLPETYFTQSRNLQ

SEQ ID NO: 95647 - protein, 17 aa, Severe acute respiratory syndrome coronavirus 2
VQQLPETYFTQSRNLQE

SEQ ID NO: 95648 - protein, 17 aa, Severe acute respiratory syndrome coronavirus 2
QQLPETYFTQSRNLQEF

SEQ ID NO: 95649 - protein, 17 aa, Severe acute respiratory syndrome coronavirus 2
QLPETYFTQSRNLQEFK

SEQ ID NO: 95650 - protein, 17 aa, Severe acute respiratory syndrome coronavirus 2
LPETYFTQSRNLQEFKP

SEQ ID NO: 95651 - protein, 17 aa, Severe acute respiratory syndrome coronavirus 2
FSHSQLGGLHLLIGLAK

SEQ ID NO: 95652 - protein, 17 aa, Severe acute respiratory syndrome coronavirus 2
LPKGIMMNVAKYTQLCQ

SEQ ID NO: 95653 - protein, 17 aa, Severe acute respiratory syndrome coronavirus 2
PKGIMMNVAKYTQLCQY

SEQ ID NO: 95654 - protein, 17 aa, Severe acute respiratory syndrome coronavirus 2
KGIMMNVAKYTQLCQYL

SEQ ID NO: 95655 - protein, 17 aa, Severe acute respiratory syndrome coronavirus 2
GIMMNVAKYTQLCQYLN

SEQ ID NO: 95656 - protein, 17 aa, Severe acute respiratory syndrome coronavirus 2
VAKYTQLCQYLNTLTLA

SEQ ID NO: 95657 - protein, 17 aa, Severe acute respiratory syndrome coronavirus 2
AKYTQLCQYLNTLTLAV

SEQ ID NO: 95658 - protein, 17 aa, Severe acute respiratory syndrome coronavirus 2
KYTQLCQYLNTLTLAVP

SEQ ID NO: 95659 - protein, 17 aa, Severe acute respiratory syndrome coronavirus 2
YTQLCQYLNTLTLAVPY

SEQ ID NO: 95660 - protein, 17 aa, Severe acute respiratory syndrome coronavirus 2
TQLCQYLNTLTLAVPYN

SEQ ID NO: 95661 - protein, 17 aa, Severe acute respiratory syndrome coronavirus 2
LTLAVPYNMRVIHFGAG

SEQ ID NO: 95662 - protein, 17 aa, Severe acute respiratory syndrome coronavirus 2
TLAVPYNMRVIHFGAGS

SEQ ID NO: 95663 - protein, 17 aa, Severe acute respiratory syndrome coronavirus 2
LAVPYNMRVIHFGAGSD

SEQ ID NO: 95664 - protein, 17 aa, Severe acute respiratory syndrome coronavirus 2
AVPYNMRVIHFGAGSDK

SEQ ID NO: 95665 - protein, 17 aa, Severe acute respiratory syndrome coronavirus 2
VAPGTAVLRQWLPTGTL

SEQ ID NO: 95666 - protein, 17 aa, Severe acute respiratory syndrome coronavirus 2
APGTAVLRQWLPTGTLL

SEQ ID NO: 95667 - protein, 17 aa, Severe acute respiratory syndrome coronavirus 2
PGTAVLRQWLPTGTLLV

SEQ ID NO: 95668 - protein, 17 aa, Severe acute respiratory syndrome coronavirus 2
GTAVLRQWLPTGTLLVD

SEQ ID NO: 95669 - protein, 17 aa, Severe acute respiratory syndrome coronavirus 2
TAVLRQWLPTGTLLVDS

SEQ ID NO: 95670 - protein, 17 aa, Severe acute respiratory syndrome coronavirus 2
AVLRQWLPTGTLLVDSD

SEQ ID NO: 95671 - protein, 17 aa, Severe acute respiratory syndrome coronavirus 2
VLRQWLPTGTLLVDSDL

SEQ ID NO: 95672 - protein, 17 aa, Severe acute respiratory syndrome coronavirus 2
LRQWLPTGTLLVDSDLN

SEQ ID NO: 95673 - protein, 17 aa, Severe acute respiratory syndrome coronavirus 2
RQWLPTGTLLVDSDLND

SEQ ID NO: 95674 - protein, 17 aa, Severe acute respiratory syndrome coronavirus 2
QWLPTGTLLVDSDLNDF

SEQ ID NO: 95675 - protein, 17 aa, Severe acute respiratory syndrome coronavirus 2
WLPTGTLLVDSDLNDFV

SEQ ID NO: 95676 - protein, 17 aa, Severe acute respiratory syndrome coronavirus 2
LPTGTLLVDSDLNDFVS

SEQ ID NO: 95677 - protein, 17 aa, Severe acute respiratory syndrome coronavirus 2
PTGTLLVDSDLNDFVSD

SEQ ID NO: 95678 - protein, 17 aa, Severe acute respiratory syndrome coronavirus 2
TGTLLVDSDLNDFVSDA

SEQ ID NO: 95679 - protein, 17 aa, Severe acute respiratory syndrome coronavirus 2
LALGGSVAIKITEHSWN

SEQ ID NO: 95680 - protein, 17 aa, Severe acute respiratory syndrome coronavirus 2
ALGGSVAIKITEHSWNA

SEQ ID NO: 95681 - protein, 17 aa, Severe acute respiratory syndrome coronavirus 2
LGGSVAIKITEHSWNAD

SEQ ID NO: 95682 - protein, 17 aa, Severe acute respiratory syndrome coronavirus 2
GGSVAIKITEHSWNADL

SEQ ID NO: 95683 - protein, 17 aa, Severe acute respiratory syndrome coronavirus 2
GSVAIKITEHSWNADLY

SEQ ID NO: 95684 - protein, 17 aa, Severe acute respiratory syndrome coronavirus 2
AIKITEHSWNADLYKLM

SEQ ID NO: 95685 - protein, 17 aa, Severe acute respiratory syndrome coronavirus 2
IKITEHSWNADLYKLMG

SEQ ID NO: 95686 - protein, 17 aa, Severe acute respiratory syndrome coronavirus 2
KITEHSWNADLYKLMGH

SEQ ID NO: 95687 - protein, 17 aa, Severe acute respiratory syndrome coronavirus 2
ITEHSWNADLYKLMGHF

SEQ ID NO: 95688 - protein, 17 aa, Severe acute respiratory syndrome coronavirus 2
LSSYSLFDMSKFPLKLR

SEQ ID NO: 95689 - protein, 17 aa, Severe acute respiratory syndrome coronavirus 2
SSYSLFDMSKFPLKLRG

SEQ ID NO: 95690 - protein, 17 aa, Severe acute respiratory syndrome coronavirus 2
SYSLFDMSKFPLKLRGT

SEQ ID NO: 95691 - protein, 17 aa, Severe acute respiratory syndrome coronavirus 2
YSLFDMSKFPLKLRGTA

SEQ ID NO: 95692 - protein, 17 aa, Severe acute respiratory syndrome coronavirus 2
SLFDMSKFPLKLRGTAV

SEQ ID NO: 95693 - protein, 17 aa, Severe acute respiratory syndrome coronavirus 2
LFDMSKFPLKLRGTAVM

SEQ ID NO: 95694 - protein, 17 aa, Severe acute respiratory syndrome coronavirus 2
FDMSKFPLKLRGTAVMS

SEQ ID NO: 95695 - protein, 17 aa, Severe acute respiratory syndrome coronavirus 2
DMSKFPLKLRGTAVMSL

SEQ ID NO: 95696 - protein, 17 aa, Severe acute respiratory syndrome coronavirus 2
MSKFPLKLRGTAVMSLK

SEQ ID NO: 95697 - protein, 17 aa, Severe acute respiratory syndrome coronavirus 2
SKFPLKLRGTAVMSLKE

SEQ ID NO: 95698 - protein, 17 aa, Severe acute respiratory syndrome coronavirus 2
QINDMILSLLSKGRLII

SEQ ID NO: 95699 - protein, 17 aa, Severe acute respiratory syndrome coronavirus 2
INDMILSLLSKGRLIIR

SEQ ID NO: 95700 - protein, 17 aa, Severe acute respiratory syndrome coronavirus 2
NDMILSLLSKGRLIIRE

SEQ ID NO: 95701 - protein, 17 aa, Severe acute respiratory syndrome coronavirus 2
DMILSLLSKGRLIIREN

SEQ ID NO: 95702 - protein, 17 aa, Severe acute respiratory syndrome coronavirus 2
MILSLLSKGRLIIRENN

SEQ ID NO: 95703 - protein, 17 aa, Severe acute respiratory syndrome coronavirus 2
ILSLLSKGRLIIRENNR

SEQ ID NO: 95704 - protein, 18 aa, Severe acute respiratory syndrome coronavirus 2
DEDDNLIDSYFVVKRHTF

SEQ ID NO: 95705 - protein, 18 aa, Severe acute respiratory syndrome coronavirus 2
EDDNLIDSYFVVKRHTFS

SEQ ID NO: 95706 - protein, 18 aa, Severe acute respiratory syndrome coronavirus 2
DDNLIDSYFVVKRHTFSN

SEQ ID NO: 95707 - protein, 18 aa, Severe acute respiratory syndrome coronavirus 2
NLIDSYFVVKRHTFSNYQ

SEQ ID NO: 95708 - protein, 18 aa, Severe acute respiratory syndrome coronavirus 2
LIDSYFVVKRHTFSNYQH

SEQ ID NO: 95709 - protein, 18 aa, Severe acute respiratory syndrome coronavirus 2
IDSYFVVKRHTFSNYQHE

SEQ ID NO: 95710 - protein, 18 aa, Severe acute respiratory syndrome coronavirus 2
DSYFVVKRHTFSNYQHEE

SEQ ID NO: 95711 - protein, 18 aa, Severe acute respiratory syndrome coronavirus 2
KHDFFKFRIDGDMVPHIS

SEQ ID NO: 95712 - protein, 18 aa, Severe acute respiratory syndrome coronavirus 2
HDFFKFRIDGDMVPHISR

SEQ ID NO: 95713 - protein, 18 aa, Severe acute respiratory syndrome coronavirus 2
DFFKFRIDGDMVPHISRQ

SEQ ID NO: 95714 - protein, 18 aa, Severe acute respiratory syndrome coronavirus 2
FFKFRIDGDMVPHISRQR

SEQ ID NO: 95715 - protein, 18 aa, Severe acute respiratory syndrome coronavirus 2
FKFRIDGDMVPHISRQRL

SEQ ID NO: 95716 - protein, 18 aa, Severe acute respiratory syndrome coronavirus 2
KFRIDGDMVPHISRQRLT

SEQ ID NO: 95717 - protein, 18 aa, Severe acute respiratory syndrome coronavirus 2
FRIDGDMVPHISRQRLTK

SEQ ID NO: 95718 - protein, 18 aa, Severe acute respiratory syndrome coronavirus 2
RIDGDMVPHISRQRLTKY

SEQ ID NO: 95719 - protein, 18 aa, Severe acute respiratory syndrome coronavirus 2
IDGDMVPHISRQRLTKYT

SEQ ID NO: 95720 - protein, 18 aa, Severe acute respiratory syndrome coronavirus 2
DGDMVPHISRQRLTKYTM

SEQ ID NO: 95721 - protein, 18 aa, Severe acute respiratory syndrome coronavirus 2
GDMVPHISRQRLTKYTMA

SEQ ID NO: 95722 - protein, 18 aa, Severe acute respiratory syndrome coronavirus 2
DMVPHISRQRLTKYTMAD

SEQ ID NO: 95723 - protein, 18 aa, Severe acute respiratory syndrome coronavirus 2
MVPHISRQRLTKYTMADL

SEQ ID NO: 95724 - protein, 18 aa, Severe acute respiratory syndrome coronavirus 2
VPHISRQRLTKYTMADLV

SEQ ID NO: 95725 - protein, 18 aa, Severe acute respiratory syndrome coronavirus 2
PHISRQRLTKYTMADLVY

SEQ ID NO: 95726 - protein, 18 aa, Severe acute respiratory syndrome coronavirus 2
HISRQRLTKYTMADLVYA

SEQ ID NO: 95727 - protein, 18 aa, Severe acute respiratory syndrome coronavirus 2
ISRQRLTKYTMADLVYAL

SEQ ID NO: 95728 - protein, 18 aa, Severe acute respiratory syndrome coronavirus 2
SRQRLTKYTMADLVYALR

SEQ ID NO: 95729 - protein, 18 aa, Severe acute respiratory syndrome coronavirus 2
RQRLTKYTMADLVYALRH

SEQ ID NO: 95730 - protein, 18 aa, Severe acute respiratory syndrome coronavirus 2
QRLTKYTMADLVYALRHF

SEQ ID NO: 95731 - protein, 18 aa, Severe acute respiratory syndrome coronavirus 2
RLTKYTMADLVYALRHFD

SEQ ID NO: 95732 - protein, 18 aa, Severe acute respiratory syndrome coronavirus 2
LTKYTMADLVYALRHFDE

SEQ ID NO: 95733 - protein, 18 aa, Severe acute respiratory syndrome coronavirus 2
TKYTMADLVYALRHFDEG

SEQ ID NO: 95734 - protein, 18 aa, Severe acute respiratory syndrome coronavirus 2
KYTMADLVYALRHFDEGN

SEQ ID NO: 95735 - protein, 18 aa, Severe acute respiratory syndrome coronavirus 2
YTMADLVYALRHFDEGNC

SEQ ID NO: 95736 - protein, 18 aa, Severe acute respiratory syndrome coronavirus 2
VQFCDAMRNAGIVGVLTL

SEQ ID NO: 95737 - protein, 18 aa, Severe acute respiratory syndrome coronavirus 2
QFCDAMRNAGIVGVLTLD

SEQ ID NO: 95738 - protein, 18 aa, Severe acute respiratory syndrome coronavirus 2
FCDAMRNAGIVGVLTLDN

SEQ ID NO: 95739 - protein, 18 aa, Severe acute respiratory syndrome coronavirus 2
CDAMRNAGIVGVLTLDNQ

SEQ ID NO: 95740 - protein, 18 aa, Severe acute respiratory syndrome coronavirus 2
DAMRNAGIVGVLTLDNQD

SEQ ID NO: 95741 - protein, 18 aa, Severe acute respiratory syndrome coronavirus 2
AMRNAGIVGVLTLDNQDL

SEQ ID NO: 95742 - protein, 18 aa, Severe acute respiratory syndrome coronavirus 2
MRNAGIVGVLTLDNQDLN

SEQ ID NO: 95743 - protein, 18 aa, Severe acute respiratory syndrome coronavirus 2
RNAGIVGVLTLDNQDLNG

SEQ ID NO: 95744 - protein, 18 aa, Severe acute respiratory syndrome coronavirus 2
NAGIVGVLTLDNQDLNGN

SEQ ID NO: 95745 - protein, 18 aa, Severe acute respiratory syndrome coronavirus 2
AGIVGVLTLDNQDLNGNW

SEQ ID NO: 95746 - protein, 18 aa, Severe acute respiratory syndrome coronavirus 2
GIVGVLTLDNQDLNGNWY

SEQ ID NO: 95747 - protein, 18 aa, Severe acute respiratory syndrome coronavirus 2
IVGVLTLDNQDLNGNWYD

SEQ ID NO: 95748 - protein, 18 aa, Severe acute respiratory syndrome coronavirus 2
SGVPVVDSYYSLLMPILT

SEQ ID NO: 95749 - protein, 18 aa, Severe acute respiratory syndrome coronavirus 2
GVPVVDSYYSLLMPILTL

SEQ ID NO: 95750 - protein, 18 aa, Severe acute respiratory syndrome coronavirus 2
PVVDSYYSLLMPILTLTR

SEQ ID NO: 95751 - protein, 18 aa, Severe acute respiratory syndrome coronavirus 2
HVDTDLTKPYIKWDLLKY

SEQ ID NO: 95752 - protein, 18 aa, Severe acute respiratory syndrome coronavirus 2
VDTDLTKPYIKWDLLKYD

SEQ ID NO: 95753 - protein, 18 aa, Severe acute respiratory syndrome coronavirus 2
DTDLTKPYIKWDLLKYDF

SEQ ID NO: 95754 - protein, 18 aa, Severe acute respiratory syndrome coronavirus 2
TDLTKPYIKWDLLKYDFT

SEQ ID NO: 95755 - protein, 18 aa, Severe acute respiratory syndrome coronavirus 2
DLTKPYIKWDLLKYDFTE

SEQ ID NO: 95756 - protein, 18 aa, Severe acute respiratory syndrome coronavirus 2
DRCILHCANFNVLFSTVF

SEQ ID NO: 95757 - protein, 18 aa, Severe acute respiratory syndrome coronavirus 2
RCILHCANFNVLFSTVFP

SEQ ID NO: 95758 - protein, 18 aa, Severe acute respiratory syndrome coronavirus 2
VRKIFVDGVPFVVSTGYH

SEQ ID NO: 95759 - protein, 18 aa, Severe acute respiratory syndrome coronavirus 2
RKIFVDGVPFVVSTGYHF

SEQ ID NO: 95760 - protein, 18 aa, Severe acute respiratory syndrome coronavirus 2
KIFVDGVPFVVSTGYHFR

SEQ ID NO: 95761 - protein, 18 aa, Severe acute respiratory syndrome coronavirus 2
IFVDGVPFVVSTGYHFRE

SEQ ID NO: 95762 - protein, 18 aa, Severe acute respiratory syndrome coronavirus 2
FVDGVPFVVSTGYHFREL

SEQ ID NO: 95763 - protein, 18 aa, Severe acute respiratory syndrome coronavirus 2
VDGVPFVVSTGYHFRELG

SEQ ID NO: 95764 - protein, 18 aa, Severe acute respiratory syndrome coronavirus 2
DGVPFVVSTGYHFRELGV

SEQ ID NO: 95765 - protein, 18 aa, Severe acute respiratory syndrome coronavirus 2
GVPFVVSTGYHFRELGVV

SEQ ID NO: 95766 - protein, 18 aa, Severe acute respiratory syndrome coronavirus 2
VPFVVSTGYHFRELGVVH

SEQ ID NO: 95767 - protein, 18 aa, Severe acute respiratory syndrome coronavirus 2
PFVVSTGYHFRELGVVHN

SEQ ID NO: 95768 - protein, 18 aa, Severe acute respiratory syndrome coronavirus 2
DVNLHSSRLSFKELLVYA

SEQ ID NO: 95769 - protein, 18 aa, Severe acute respiratory syndrome coronavirus 2
VNLHSSRLSFKELLVYAA

SEQ ID NO: 95770 - protein, 18 aa, Severe acute respiratory syndrome coronavirus 2
NLHSSRLSFKELLVYAAD

SEQ ID NO: 95771 - protein, 18 aa, Severe acute respiratory syndrome coronavirus 2
LHSSRLSFKELLVYAADP

SEQ ID NO: 95772 - protein, 18 aa, Severe acute respiratory syndrome coronavirus 2
HSSRLSFKELLVYAADPA

SEQ ID NO: 95773 - protein, 18 aa, Severe acute respiratory syndrome coronavirus 2
FQTVKPGNFNKDFYDFAV

SEQ ID NO: 95774 - protein, 18 aa, Severe acute respiratory syndrome coronavirus 2
QTVKPGNFNKDFYDFAVS

SEQ ID NO: 95775 - protein, 18 aa, Severe acute respiratory syndrome coronavirus 2
ISDYDYYRYNLPTMCDIR

SEQ ID NO: 95776 - protein, 18 aa, Severe acute respiratory syndrome coronavirus 2
SDYDYYRYNLPTMCDIRQ

SEQ ID NO: 95777 - protein, 18 aa, Severe acute respiratory syndrome coronavirus 2
DYDYYRYNLPTMCDIRQL

SEQ ID NO: 95778 - protein, 18 aa, Severe acute respiratory syndrome coronavirus 2
YDYYRYNLPTMCDIRQLL

SEQ ID NO: 95779 - protein, 18 aa, Severe acute respiratory syndrome coronavirus 2
DYYRYNLPTMCDIRQLLF

SEQ ID NO: 95780 - protein, 18 aa, Severe acute respiratory syndrome coronavirus 2
YTKRNVIPTITQMNLKYA

SEQ ID NO: 95781 - protein, 18 aa, Severe acute respiratory syndrome coronavirus 2
TKRNVIPTITQMNLKYAI

SEQ ID NO: 95782 - protein, 18 aa, Severe acute respiratory syndrome coronavirus 2
KRNVIPTITQMNLKYAIS

SEQ ID NO: 95783 - protein, 18 aa, Severe acute respiratory syndrome coronavirus 2
RNVIPTITQMNLKYAISA

SEQ ID NO: 95784 - protein, 18 aa, Severe acute respiratory syndrome coronavirus 2
NVIPTITQMNLKYAISAK

SEQ ID NO: 95785 - protein, 18 aa, Severe acute respiratory syndrome coronavirus 2
VIPTITQMNLKYAISAKN

SEQ ID NO: 95786 - protein, 18 aa, Severe acute respiratory syndrome coronavirus 2
IPTITQMNLKYAISAKNR

SEQ ID NO: 95787 - protein, 18 aa, Severe acute respiratory syndrome coronavirus 2
PTITQMNLKYAISAKNRA

SEQ ID NO: 95788 - protein, 18 aa, Severe acute respiratory syndrome coronavirus 2
TITQMNLKYAISAKNRAR

SEQ ID NO: 95789 - protein, 18 aa, Severe acute respiratory syndrome coronavirus 2
ITQMNLKYAISAKNRART

SEQ ID NO: 95790 - protein, 18 aa, Severe acute respiratory syndrome coronavirus 2
TQMNLKYAISAKNRARTV

SEQ ID NO: 95791 - protein, 18 aa, Severe acute respiratory syndrome coronavirus 2
QMNLKYAISAKNRARTVA

SEQ ID NO: 95792 - protein, 18 aa, Severe acute respiratory syndrome coronavirus 2
MNLKYAISAKNRARTVAG

SEQ ID NO: 95793 - protein, 18 aa, Severe acute respiratory syndrome coronavirus 2
NLKYAISAKNRARTVAGV

SEQ ID NO: 95794 - protein, 18 aa, Severe acute respiratory syndrome coronavirus 2
LKYAISAKNRARTVAGVS

SEQ ID NO: 95795 - protein, 18 aa, Severe acute respiratory syndrome coronavirus 2
KYAISAKNRARTVAGVSI

SEQ ID NO: 95796 - protein, 18 aa, Severe acute respiratory syndrome coronavirus 2
YAISAKNRARTVAGVSIC

SEQ ID NO: 95797 - protein, 18 aa, Severe acute respiratory syndrome coronavirus 2
AISAKNRARTVAGVSICS

SEQ ID NO: 95798 - protein, 18 aa, Severe acute respiratory syndrome coronavirus 2
ISAKNRARTVAGVSICST

SEQ ID NO: 95799 - protein, 18 aa, Severe acute respiratory syndrome coronavirus 2
SAKNRARTVAGVSICSTM

SEQ ID NO: 95800 - protein, 18 aa, Severe acute respiratory syndrome coronavirus 2
AKNRARTVAGVSICSTMT

SEQ ID NO: 95801 - protein, 18 aa, Severe acute respiratory syndrome coronavirus 2
KNRARTVAGVSICSTMTN

SEQ ID NO: 95802 - protein, 18 aa, Severe acute respiratory syndrome coronavirus 2
NRARTVAGVSICSTMTNR

SEQ ID NO: 95803 - protein, 18 aa, Severe acute respiratory syndrome coronavirus 2
RARTVAGVSICSTMTNRQ

SEQ ID NO: 95804 - protein, 18 aa, Severe acute respiratory syndrome coronavirus 2
ARTVAGVSICSTMTNRQF

SEQ ID NO: 95805 - protein, 18 aa, Severe acute respiratory syndrome coronavirus 2
RTVAGVSICSTMTNRQFH

SEQ ID NO: 95806 - protein, 18 aa, Severe acute respiratory syndrome coronavirus 2
TVAGVSICSTMTNRQFHQ

SEQ ID NO: 95807 - protein, 18 aa, Severe acute respiratory syndrome coronavirus 2
ICSTMTNRQFHQKLLKSI

SEQ ID NO: 95808 - protein, 18 aa, Severe acute respiratory syndrome coronavirus 2
CSTMTNRQFHQKLLKSIA

SEQ ID NO: 95809 - protein, 18 aa, Severe acute respiratory syndrome coronavirus 2
STMTNRQFHQKLLKSIAA

SEQ ID NO: 95810 - protein, 18 aa, Severe acute respiratory syndrome coronavirus 2
TMTNRQFHQKLLKSIAAT

SEQ ID NO: 95811 - protein, 18 aa, Severe acute respiratory syndrome coronavirus 2
MTNRQFHQKLLKSIAATR

SEQ ID NO: 95812 - protein, 18 aa, Severe acute respiratory syndrome coronavirus 2
TNRQFHQKLLKSIAATRG

SEQ ID NO: 95813 - protein, 18 aa, Severe acute respiratory syndrome coronavirus 2
NRQFHQKLLKSIAATRGA

SEQ ID NO: 95814 - protein, 18 aa, Severe acute respiratory syndrome coronavirus 2
RQFHQKLLKSIAATRGAT

SEQ ID NO: 95815 - protein, 18 aa, Severe acute respiratory syndrome coronavirus 2
IGTSKFYGGWHNMLKTVY

SEQ ID NO: 95816 - protein, 18 aa, Severe acute respiratory syndrome coronavirus 2
GSLYVKPGGTSSGDATTA

SEQ ID NO: 95817 - protein, 18 aa, Severe acute respiratory syndrome coronavirus 2
SLYVKPGGTSSGDATTAY

SEQ ID NO: 95818 - protein, 18 aa, Severe acute respiratory syndrome coronavirus 2
LYVKPGGTSSGDATTAYA

SEQ ID NO: 95819 - protein, 18 aa, Severe acute respiratory syndrome coronavirus 2
YVKPGGTSSGDATTAYAN

SEQ ID NO: 95820 - protein, 18 aa, Severe acute respiratory syndrome coronavirus 2
VKPGGTSSGDATTAYANS

SEQ ID NO: 95821 - protein, 18 aa, Severe acute respiratory syndrome coronavirus 2
KPGGTSSGDATTAYANSV

SEQ ID NO: 95822 - protein, 18 aa, Severe acute respiratory syndrome coronavirus 2
PGGTSSGDATTAYANSVF

SEQ ID NO: 95823 - protein, 18 aa, Severe acute respiratory syndrome coronavirus 2
GGTSSGDATTAYANSVFN

SEQ ID NO: 95824 - protein, 18 aa, Severe acute respiratory syndrome coronavirus 2
GTSSGDATTAYANSVFNI

SEQ ID NO: 95825 - protein, 18 aa, Severe acute respiratory syndrome coronavirus 2
TSSGDATTAYANSVFNIC

SEQ ID NO: 95826 - protein, 18 aa, Severe acute respiratory syndrome coronavirus 2
SSGDATTAYANSVFNICQ

SEQ ID NO: 95827 - protein, 18 aa, Severe acute respiratory syndrome coronavirus 2
SGDATTAYANSVFNICQA

SEQ ID NO: 95828 - protein, 18 aa, Severe acute respiratory syndrome coronavirus 2
GDATTAYANSVFNICQAV

SEQ ID NO: 95829 - protein, 18 aa, Severe acute respiratory syndrome coronavirus 2
DATTAYANSVFNICQAVT

SEQ ID NO: 95830 - protein, 18 aa, Severe acute respiratory syndrome coronavirus 2
ATTAYANSVFNICQAVTA

SEQ ID NO: 95831 - protein, 18 aa, Severe acute respiratory syndrome coronavirus 2
TTAYANSVFNICQAVTAN

SEQ ID NO: 95832 - protein, 18 aa, Severe acute respiratory syndrome coronavirus 2
TAYANSVFNICQAVTANV

SEQ ID NO: 95833 - protein, 18 aa, Severe acute respiratory syndrome coronavirus 2
AYANSVFNICQAVTANVN

SEQ ID NO: 95834 - protein, 18 aa, Severe acute respiratory syndrome coronavirus 2
YANSVFNICQAVTANVNA

SEQ ID NO: 95835 - protein, 18 aa, Severe acute respiratory syndrome coronavirus 2
ANSVFNICQAVTANVNAL

SEQ ID NO: 95836 - protein, 18 aa, Severe acute respiratory syndrome coronavirus 2
NSVFNICQAVTANVNALL

SEQ ID NO: 95837 - protein, 18 aa, Severe acute respiratory syndrome coronavirus 2
SVFNICQAVTANVNALLS

SEQ ID NO: 95838 - protein, 18 aa, Severe acute respiratory syndrome coronavirus 2
VFNICQAVTANVNALLST

SEQ ID NO: 95839 - protein, 18 aa, Severe acute respiratory syndrome coronavirus 2
FNICQAVTANVNALLSTD

SEQ ID NO: 95840 - protein, 18 aa, Severe acute respiratory syndrome coronavirus 2
NICQAVTANVNALLSTDG

SEQ ID NO: 95841 - protein, 18 aa, Severe acute respiratory syndrome coronavirus 2
ICQAVTANVNALLSTDGN

SEQ ID NO: 95842 - protein, 18 aa, Severe acute respiratory syndrome coronavirus 2
CQAVTANVNALLSTDGNK

SEQ ID NO: 95843 - protein, 18 aa, Severe acute respiratory syndrome coronavirus 2
QAVTANVNALLSTDGNKI

SEQ ID NO: 95844 - protein, 18 aa, Severe acute respiratory syndrome coronavirus 2
AVTANVNALLSTDGNKIA

SEQ ID NO: 95845 - protein, 18 aa, Severe acute respiratory syndrome coronavirus 2
VTANVNALLSTDGNKIAD

SEQ ID NO: 95846 - protein, 18 aa, Severe acute respiratory syndrome coronavirus 2
TANVNALLSTDGNKIADK

SEQ ID NO: 95847 - protein, 18 aa, Severe acute respiratory syndrome coronavirus 2
ANVNALLSTDGNKIADKY

SEQ ID NO: 95848 - protein, 18 aa, Severe acute respiratory syndrome coronavirus 2
NVNALLSTDGNKIADKYV

SEQ ID NO: 95849 - protein, 18 aa, Severe acute respiratory syndrome coronavirus 2
VNALLSTDGNKIADKYVR

SEQ ID NO: 95850 - protein, 18 aa, Severe acute respiratory syndrome coronavirus 2
DGNKIADKYVRNLQHRLY

SEQ ID NO: 95851 - protein, 18 aa, Severe acute respiratory syndrome coronavirus 2
GNKIADKYVRNLQHRLYE

SEQ ID NO: 95852 - protein, 18 aa, Severe acute respiratory syndrome coronavirus 2
KIADKYVRNLQHRLYECL

SEQ ID NO: 95853 - protein, 18 aa, Severe acute respiratory syndrome coronavirus 2
IADKYVRNLQHRLYECLY

SEQ ID NO: 95854 - protein, 18 aa, Severe acute respiratory syndrome coronavirus 2
ADKYVRNLQHRLYECLYR

SEQ ID NO: 95855 - protein, 18 aa, Severe acute respiratory syndrome coronavirus 2
FYAYLRKHFSMMILSDDA

SEQ ID NO: 95856 - protein, 18 aa, Severe acute respiratory syndrome coronavirus 2
YAYLRKHFSMMILSDDAV

SEQ ID NO: 95857 - protein, 18 aa, Severe acute respiratory syndrome coronavirus 2
AYLRKHFSMMILSDDAVV

SEQ ID NO: 95858 - protein, 18 aa, Severe acute respiratory syndrome coronavirus 2
YLRKHFSMMILSDDAVVC

SEQ ID NO: 95859 - protein, 18 aa, Severe acute respiratory syndrome coronavirus 2
LRKHFSMMILSDDAVVCF

SEQ ID NO: 95860 - protein, 18 aa, Severe acute respiratory syndrome coronavirus 2
LVASIKNFKSVLYYQNNV

SEQ ID NO: 95861 - protein, 18 aa, Severe acute respiratory syndrome coronavirus 2
VASIKNFKSVLYYQNNVF

SEQ ID NO: 95862 - protein, 18 aa, Severe acute respiratory syndrome coronavirus 2
ASIKNFKSVLYYQNNVFM

SEQ ID NO: 95863 - protein, 18 aa, Severe acute respiratory syndrome coronavirus 2
SIKNFKSVLYYQNNVFMS

SEQ ID NO: 95864 - protein, 18 aa, Severe acute respiratory syndrome coronavirus 2
IKNFKSVLYYQNNVFMSE

SEQ ID NO: 95865 - protein, 18 aa, Severe acute respiratory syndrome coronavirus 2
KNFKSVLYYQNNVFMSEA

SEQ ID NO: 95866 - protein, 18 aa, Severe acute respiratory syndrome coronavirus 2
NFKSVLYYQNNVFMSEAK

SEQ ID NO: 95867 - protein, 18 aa, Severe acute respiratory syndrome coronavirus 2
FKSVLYYQNNVFMSEAKC

SEQ ID NO: 95868 - protein, 18 aa, Severe acute respiratory syndrome coronavirus 2
KSVLYYQNNVFMSEAKCW

SEQ ID NO: 95869 - protein, 18 aa, Severe acute respiratory syndrome coronavirus 2
SVLYYQNNVFMSEAKCWT

SEQ ID NO: 95870 - protein, 18 aa, Severe acute respiratory syndrome coronavirus 2
VLYYQNNVFMSEAKCWTE

SEQ ID NO: 95871 - protein, 18 aa, Severe acute respiratory syndrome coronavirus 2
LYYQNNVFMSEAKCWTET

SEQ ID NO: 95872 - protein, 18 aa, Severe acute respiratory syndrome coronavirus 2
YYQNNVFMSEAKCWTETD

SEQ ID NO: 95873 - protein, 18 aa, Severe acute respiratory syndrome coronavirus 2
PDPSRILGAGCFVDDIVK

SEQ ID NO: 95874 - protein, 18 aa, Severe acute respiratory syndrome coronavirus 2
PSRILGAGCFVDDIVKTD

SEQ ID NO: 95875 - protein, 18 aa, Severe acute respiratory syndrome coronavirus 2
SRILGAGCFVDDIVKTDG

SEQ ID NO: 95876 - protein, 18 aa, Severe acute respiratory syndrome coronavirus 2
GCFVDDIVKTDGTLMIER

SEQ ID NO: 95877 - protein, 18 aa, Severe acute respiratory syndrome coronavirus 2
CFVDDIVKTDGTLMIERF

SEQ ID NO: 95878 - protein, 18 aa, Severe acute respiratory syndrome coronavirus 2
FVDDIVKTDGTLMIERFV

SEQ ID NO: 95879 - protein, 18 aa, Severe acute respiratory syndrome coronavirus 2
VDDIVKTDGTLMIERFVS

SEQ ID NO: 95880 - protein, 18 aa, Severe acute respiratory syndrome coronavirus 2
DDIVKTDGTLMIERFVSL

SEQ ID NO: 95881 - protein, 18 aa, Severe acute respiratory syndrome coronavirus 2
DIVKTDGTLMIERFVSLA

SEQ ID NO: 95882 - protein, 18 aa, Severe acute respiratory syndrome coronavirus 2
IVKTDGTLMIERFVSLAI

SEQ ID NO: 95883 - protein, 18 aa, Severe acute respiratory syndrome coronavirus 2
VKTDGTLMIERFVSLAID

SEQ ID NO: 95884 - protein, 18 aa, Severe acute respiratory syndrome coronavirus 2
KTDGTLMIERFVSLAIDA

SEQ ID NO: 95885 - protein, 18 aa, Severe acute respiratory syndrome coronavirus 2
TDGTLMIERFVSLAIDAY

SEQ ID NO: 95886 - protein, 18 aa, Severe acute respiratory syndrome coronavirus 2
DGTLMIERFVSLAIDAYP

SEQ ID NO: 95887 - protein, 18 aa, Severe acute respiratory syndrome coronavirus 2
GTLMIERFVSLAIDAYPL

SEQ ID NO: 95888 - protein, 18 aa, Severe acute respiratory syndrome coronavirus 2
FPLCANGQVFGLYKNTCV

SEQ ID NO: 95889 - protein, 18 aa, Severe acute respiratory syndrome coronavirus 2
PLCANGQVFGLYKNTCVG

SEQ ID NO: 95890 - protein, 18 aa, Severe acute respiratory syndrome coronavirus 2
LCANGQVFGLYKNTCVGS

SEQ ID NO: 95891 - protein, 18 aa, Severe acute respiratory syndrome coronavirus 2
CANGQVFGLYKNTCVGSD

SEQ ID NO: 95892 - protein, 18 aa, Severe acute respiratory syndrome coronavirus 2
EETFKLSYGIATVREVLS

SEQ ID NO: 95893 - protein, 18 aa, Severe acute respiratory syndrome coronavirus 2
ETFKLSYGIATVREVLSD

SEQ ID NO: 95894 - protein, 18 aa, Severe acute respiratory syndrome coronavirus 2
TFKLSYGIATVREVLSDR

SEQ ID NO: 95895 - protein, 18 aa, Severe acute respiratory syndrome coronavirus 2
FKLSYGIATVREVLSDRE

SEQ ID NO: 95896 - protein, 18 aa, Severe acute respiratory syndrome coronavirus 2
KLSYGIATVREVLSDREL

SEQ ID NO: 95897 - protein, 18 aa, Severe acute respiratory syndrome coronavirus 2
RPPLNRNYVFTGYRVTKN

SEQ ID NO: 95898 - protein, 18 aa, Severe acute respiratory syndrome coronavirus 2
PPLNRNYVFTGYRVTKNS

SEQ ID NO: 95899 - protein, 18 aa, Severe acute respiratory syndrome coronavirus 2
PLNRNYVFTGYRVTKNSK

SEQ ID NO: 95900 - protein, 18 aa, Severe acute respiratory syndrome coronavirus 2
VYTACSHAAVDALCEKAL

SEQ ID NO: 95901 - protein, 18 aa, Severe acute respiratory syndrome coronavirus 2
AAVDALCEKALKYLPIDK

SEQ ID NO: 95902 - protein, 18 aa, Severe acute respiratory syndrome coronavirus 2
AVDALCEKALKYLPIDKC

SEQ ID NO: 95903 - protein, 18 aa, Severe acute respiratory syndrome coronavirus 2
VDALCEKALKYLPIDKCS

SEQ ID NO: 95904 - protein, 18 aa, Severe acute respiratory syndrome coronavirus 2
DALCEKALKYLPIDKCSR

SEQ ID NO: 95905 - protein, 18 aa, Severe acute respiratory syndrome coronavirus 2
ALCEKALKYLPIDKCSRI

SEQ ID NO: 95906 - protein, 18 aa, Severe acute respiratory syndrome coronavirus 2
LCEKALKYLPIDKCSRII

SEQ ID NO: 95907 - protein, 18 aa, Severe acute respiratory syndrome coronavirus 2
CEKALKYLPIDKCSRIIP

SEQ ID NO: 95908 - protein, 18 aa, Severe acute respiratory syndrome coronavirus 2
EKALKYLPIDKCSRIIPA

SEQ ID NO: 95909 - protein, 18 aa, Severe acute respiratory syndrome coronavirus 2
KALKYLPIDKCSRIIPAR

SEQ ID NO: 95910 - protein, 18 aa, Severe acute respiratory syndrome coronavirus 2
ALKYLPIDKCSRIIPARA

SEQ ID NO: 95911 - protein, 18 aa, Severe acute respiratory syndrome coronavirus 2
LKYLPIDKCSRIIPARAR

SEQ ID NO: 95912 - protein, 18 aa, Severe acute respiratory syndrome coronavirus 2
KYLPIDKCSRIIPARARV

SEQ ID NO: 95913 - protein, 18 aa, Severe acute respiratory syndrome coronavirus 2
YLPIDKCSRIIPARARVE

SEQ ID NO: 95914 - protein, 18 aa, Severe acute respiratory syndrome coronavirus 2
LPIDKCSRIIPARARVEC

SEQ ID NO: 95915 - protein, 18 aa, Severe acute respiratory syndrome coronavirus 2
PIDKCSRIIPARARVECF

SEQ ID NO: 95916 - protein, 18 aa, Severe acute respiratory syndrome coronavirus 2
IDKCSRIIPARARVECFD

SEQ ID NO: 95917 - protein, 18 aa, Severe acute respiratory syndrome coronavirus 2
DKCSRIIPARARVECFDK

SEQ ID NO: 95918 - protein, 18 aa, Severe acute respiratory syndrome coronavirus 2
KCSRIIPARARVECFDKF

SEQ ID NO: 95919 - protein, 18 aa, Severe acute respiratory syndrome coronavirus 2
SAINRPQIGVVREFLTRN

SEQ ID NO: 95920 - protein, 18 aa, Severe acute respiratory syndrome coronavirus 2
AWRKAVFISPYNSQNAVA

SEQ ID NO: 95921 - protein, 18 aa, Severe acute respiratory syndrome coronavirus 2
WRKAVFISPYNSQNAVAS

SEQ ID NO: 95922 - protein, 18 aa, Severe acute respiratory syndrome coronavirus 2
SDRDLYDKLQFTSLEIPR

SEQ ID NO: 95923 - protein, 18 aa, Severe acute respiratory syndrome coronavirus 2
GIPKDMTYRRLISMMGFK

SEQ ID NO: 95924 - protein, 18 aa, Severe acute respiratory syndrome coronavirus 2
IPKDMTYRRLISMMGFKM

SEQ ID NO: 95925 - protein, 18 aa, Severe acute respiratory syndrome coronavirus 2
PKDMTYRRLISMMGFKMN

SEQ ID NO: 95926 - protein, 18 aa, Severe acute respiratory syndrome coronavirus 2
KDMTYRRLISMMGFKMNY

SEQ ID NO: 95927 - protein, 18 aa, Severe acute respiratory syndrome coronavirus 2
DMTYRRLISMMGFKMNYQ

SEQ ID NO: 95928 - protein, 18 aa, Severe acute respiratory syndrome coronavirus 2
MTYRRLISMMGFKMNYQV

SEQ ID NO: 95929 - protein, 18 aa, Severe acute respiratory syndrome coronavirus 2
TYRRLISMMGFKMNYQVN

SEQ ID NO: 95930 - protein, 18 aa, Severe acute respiratory syndrome coronavirus 2
YRRLISMMGFKMNYQVNG

SEQ ID NO: 95931 - protein, 18 aa, Severe acute respiratory syndrome coronavirus 2
RRLISMMGFKMNYQVNGY

SEQ ID NO: 95932 - protein, 18 aa, Severe acute respiratory syndrome coronavirus 2
RLISMMGFKMNYQVNGYP

SEQ ID NO: 95933 - protein, 18 aa, Severe acute respiratory syndrome coronavirus 2
LISMMGFKMNYQVNGYPN

SEQ ID NO: 95934 - protein, 18 aa, Severe acute respiratory syndrome coronavirus 2
ISMMGFKMNYQVNGYPNM

SEQ ID NO: 95935 - protein, 18 aa, Severe acute respiratory syndrome coronavirus 2
SMMGFKMNYQVNGYPNMF

SEQ ID NO: 95936 - protein, 18 aa, Severe acute respiratory syndrome coronavirus 2
MMGFKMNYQVNGYPNMFI

SEQ ID NO: 95937 - protein, 18 aa, Severe acute respiratory syndrome coronavirus 2
MGFKMNYQVNGYPNMFIT

SEQ ID NO: 95938 - protein, 18 aa, Severe acute respiratory syndrome coronavirus 2
GFKMNYQVNGYPNMFITR

SEQ ID NO: 95939 - protein, 18 aa, Severe acute respiratory syndrome coronavirus 2
FKMNYQVNGYPNMFITRE

SEQ ID NO: 95940 - protein, 18 aa, Severe acute respiratory syndrome coronavirus 2
KMNYQVNGYPNMFITREE

SEQ ID NO: 95941 - protein, 18 aa, Severe acute respiratory syndrome coronavirus 2
MNYQVNGYPNMFITREEA

SEQ ID NO: 95942 - protein, 18 aa, Severe acute respiratory syndrome coronavirus 2
NYQVNGYPNMFITREEAI

SEQ ID NO: 95943 - protein, 18 aa, Severe acute respiratory syndrome coronavirus 2
FITREEAIRHVRAWIGFD

SEQ ID NO: 95944 - protein, 18 aa, Severe acute respiratory syndrome coronavirus 2
HVRAWIGFDVEGCHATRE

SEQ ID NO: 95945 - protein, 18 aa, Severe acute respiratory syndrome coronavirus 2
VRAWIGFDVEGCHATREA

SEQ ID NO: 95946 - protein, 18 aa, Severe acute respiratory syndrome coronavirus 2
PWNVVRLKIVQMLSDTLK

SEQ ID NO: 95947 - protein, 18 aa, Severe acute respiratory syndrome coronavirus 2
SDRVVFVLWAHGFELTSM

SEQ ID NO: 95948 - protein, 18 aa, Severe acute respiratory syndrome coronavirus 2
DRVVFVLWAHGFELTSMK

SEQ ID NO: 95949 - protein, 18 aa, Severe acute respiratory syndrome coronavirus 2
RVVFVLWAHGFELTSMKY

SEQ ID NO: 95950 - protein, 18 aa, Severe acute respiratory syndrome coronavirus 2
VVFVLWAHGFELTSMKYF

SEQ ID NO: 95951 - protein, 18 aa, Severe acute respiratory syndrome coronavirus 2
VFVLWAHGFELTSMKYFV

SEQ ID NO: 95952 - protein, 18 aa, Severe acute respiratory syndrome coronavirus 2
FVLWAHGFELTSMKYFVK

SEQ ID NO: 95953 - protein, 18 aa, Severe acute respiratory syndrome coronavirus 2
VLWAHGFELTSMKYFVKI

SEQ ID NO: 95954 - protein, 18 aa, Severe acute respiratory syndrome coronavirus 2
LWAHGFELTSMKYFVKIG

SEQ ID NO: 95955 - protein, 18 aa, Severe acute respiratory syndrome coronavirus 2
WAHGFELTSMKYFVKIGP

SEQ ID NO: 95956 - protein, 18 aa, Severe acute respiratory syndrome coronavirus 2
AHGFELTSMKYFVKIGPE

SEQ ID NO: 95957 - protein, 18 aa, Severe acute respiratory syndrome coronavirus 2
HGFELTSMKYFVKIGPER

SEQ ID NO: 95958 - protein, 18 aa, Severe acute respiratory syndrome coronavirus 2
GFELTSMKYFVKIGPERT

SEQ ID NO: 95959 - protein, 18 aa, Severe acute respiratory syndrome coronavirus 2
FELTSMKYFVKIGPERTC

SEQ ID NO: 95960 - protein, 18 aa, Severe acute respiratory syndrome coronavirus 2
ELTSMKYFVKIGPERTCC

SEQ ID NO: 95961 - protein, 18 aa, Severe acute respiratory syndrome coronavirus 2
LTSMKYFVKIGPERTCCL

SEQ ID NO: 95962 - protein, 18 aa, Severe acute respiratory syndrome coronavirus 2
TSMKYFVKIGPERTCCLC

SEQ ID NO: 95963 - protein, 18 aa, Severe acute respiratory syndrome coronavirus 2
SMKYFVKIGPERTCCLCD

SEQ ID NO: 95964 - protein, 18 aa, Severe acute respiratory syndrome coronavirus 2
GVCLFWNCNVDRYPANSI

SEQ ID NO: 95965 - protein, 18 aa, Severe acute respiratory syndrome coronavirus 2
VCLFWNCNVDRYPANSIV

SEQ ID NO: 95966 - protein, 18 aa, Severe acute respiratory syndrome coronavirus 2
RYPANSIVCRFDTRVLSN

SEQ ID NO: 95967 - protein, 18 aa, Severe acute respiratory syndrome coronavirus 2
YPANSIVCRFDTRVLSNL

SEQ ID NO: 95968 - protein, 18 aa, Severe acute respiratory syndrome coronavirus 2
PANSIVCRFDTRVLSNLN

SEQ ID NO: 95969 - protein, 18 aa, Severe acute respiratory syndrome coronavirus 2
ANSIVCRFDTRVLSNLNL

SEQ ID NO: 95970 - protein, 18 aa, Severe acute respiratory syndrome coronavirus 2
DKSAFVNLKQLPFFYYSD

SEQ ID NO: 95971 - protein, 18 aa, Severe acute respiratory syndrome coronavirus 2
KSAFVNLKQLPFFYYSDS

SEQ ID NO: 95972 - protein, 18 aa, Severe acute respiratory syndrome coronavirus 2
SAFVNLKQLPFFYYSDSP

SEQ ID NO: 95973 - protein, 18 aa, Severe acute respiratory syndrome coronavirus 2
AFVNLKQLPFFYYSDSPC

SEQ ID NO: 95974 - protein, 18 aa, Severe acute respiratory syndrome coronavirus 2
FVNLKQLPFFYYSDSPCE

SEQ ID NO: 95975 - protein, 18 aa, Severe acute respiratory syndrome coronavirus 2
VNLKQLPFFYYSDSPCES

SEQ ID NO: 95976 - protein, 18 aa, Severe acute respiratory syndrome coronavirus 2
NLKQLPFFYYSDSPCESH

SEQ ID NO: 95977 - protein, 18 aa, Severe acute respiratory syndrome coronavirus 2
LKQLPFFYYSDSPCESHG

SEQ ID NO: 95978 - protein, 18 aa, Severe acute respiratory syndrome coronavirus 2
KQLPFFYYSDSPCESHGK

SEQ ID NO: 95979 - protein, 18 aa, Severe acute respiratory syndrome coronavirus 2
VVSDIDYVPLKSATCITR

SEQ ID NO: 95980 - protein, 18 aa, Severe acute respiratory syndrome coronavirus 2
VSDIDYVPLKSATCITRC

SEQ ID NO: 95981 - protein, 18 aa, Severe acute respiratory syndrome coronavirus 2
SDIDYVPLKSATCITRCN

SEQ ID NO: 95982 - protein, 18 aa, Severe acute respiratory syndrome coronavirus 2
DIDYVPLKSATCITRCNL

SEQ ID NO: 95983 - protein, 18 aa, Severe acute respiratory syndrome coronavirus 2
IDYVPLKSATCITRCNLG

SEQ ID NO: 95984 - protein, 18 aa, Severe acute respiratory syndrome coronavirus 2
DYVPLKSATCITRCNLGG

SEQ ID NO: 95985 - protein, 18 aa, Severe acute respiratory syndrome coronavirus 2
ISAGFSLWVYKQFDTYNL

SEQ ID NO: 95986 - protein, 18 aa, Severe acute respiratory syndrome coronavirus 2
SAGFSLWVYKQFDTYNLW

SEQ ID NO: 95987 - protein, 18 aa, Severe acute respiratory syndrome coronavirus 2
AGFSLWVYKQFDTYNLWN

SEQ ID NO: 95988 - protein, 18 aa, Severe acute respiratory syndrome coronavirus 2
GFSLWVYKQFDTYNLWNT

SEQ ID NO: 95989 - protein, 18 aa, Severe acute respiratory syndrome coronavirus 2
FSLWVYKQFDTYNLWNTF

SEQ ID NO: 95990 - protein, 18 aa, Severe acute respiratory syndrome coronavirus 2
LWVYKQFDTYNLWNTFTR

SEQ ID NO: 95991 - protein, 18 aa, Severe acute respiratory syndrome coronavirus 2
WVYKQFDTYNLWNTFTRL

SEQ ID NO: 95992 - protein, 18 aa, Severe acute respiratory syndrome coronavirus 2
VYKQFDTYNLWNTFTRLQ

SEQ ID NO: 95993 - protein, 18 aa, Severe acute respiratory syndrome coronavirus 2
KTTLPVNVAFELWAKRNI

SEQ ID NO: 95994 - protein, 18 aa, Severe acute respiratory syndrome coronavirus 2
TTLPVNVAFELWAKRNIK

SEQ ID NO: 95995 - protein, 18 aa, Severe acute respiratory syndrome coronavirus 2
TLPVNVAFELWAKRNIKP

SEQ ID NO: 95996 - protein, 18 aa, Severe acute respiratory syndrome coronavirus 2
LPVNVAFELWAKRNIKPV

SEQ ID NO: 95997 - protein, 18 aa, Severe acute respiratory syndrome coronavirus 2
PVNVAFELWAKRNIKPVP

SEQ ID NO: 95998 - protein, 18 aa, Severe acute respiratory syndrome coronavirus 2
VNVAFELWAKRNIKPVPE

SEQ ID NO: 95999 - protein, 18 aa, Severe acute respiratory syndrome coronavirus 2
IAANTVIWDYKRDAPAHI

SEQ ID NO: 96000 - protein, 18 aa, Severe acute respiratory syndrome coronavirus 2
DYKRDAPAHISTIGVCSM

SEQ ID NO: 96001 - protein, 18 aa, Severe acute respiratory syndrome coronavirus 2
YKRDAPAHISTIGVCSMT

SEQ ID NO: 96002 - protein, 18 aa, Severe acute respiratory syndrome coronavirus 2
KRDAPAHISTIGVCSMTD

SEQ ID NO: 96003 - protein, 18 aa, Severe acute respiratory syndrome coronavirus 2
RDAPAHISTIGVCSMTDI

SEQ ID NO: 96004 - protein, 18 aa, Severe acute respiratory syndrome coronavirus 2
DAPAHISTIGVCSMTDIA

SEQ ID NO: 96005 - protein, 18 aa, Severe acute respiratory syndrome coronavirus 2
APAHISTIGVCSMTDIAK

SEQ ID NO: 96006 - protein, 18 aa, Severe acute respiratory syndrome coronavirus 2
PAHISTIGVCSMTDIAKK

SEQ ID NO: 96007 - protein, 18 aa, Severe acute respiratory syndrome coronavirus 2
AHISTIGVCSMTDIAKKP

SEQ ID NO: 96008 - protein, 18 aa, Severe acute respiratory syndrome coronavirus 2
SVGPKQASLNGVTLIGEA

SEQ ID NO: 96009 - protein, 18 aa, Severe acute respiratory syndrome coronavirus 2
KTQFNYYKKVDGVVQQLP

SEQ ID NO: 96010 - protein, 18 aa, Severe acute respiratory syndrome coronavirus 2
TQFNYYKKVDGVVQQLPE

SEQ ID NO: 96011 - protein, 18 aa, Severe acute respiratory syndrome coronavirus 2
QFNYYKKVDGVVQQLPET

SEQ ID NO: 96012 - protein, 18 aa, Severe acute respiratory syndrome coronavirus 2
FNYYKKVDGVVQQLPETY

SEQ ID NO: 96013 - protein, 18 aa, Severe acute respiratory syndrome coronavirus 2
VQQLPETYFTQSRNLQEF

SEQ ID NO: 96014 - protein, 18 aa, Severe acute respiratory syndrome coronavirus 2
QQLPETYFTQSRNLQEFK

SEQ ID NO: 96015 - protein, 18 aa, Severe acute respiratory syndrome coronavirus 2
QLPETYFTQSRNLQEFKP

SEQ ID NO: 96016 - protein, 18 aa, Severe acute respiratory syndrome coronavirus 2
LPKGIMMNVAKYTQLCQY

SEQ ID NO: 96017 - protein, 18 aa, Severe acute respiratory syndrome coronavirus 2
PKGIMMNVAKYTQLCQYL

SEQ ID NO: 96018 - protein, 18 aa, Severe acute respiratory syndrome coronavirus 2
KGIMMNVAKYTQLCQYLN

SEQ ID NO: 96019 - protein, 18 aa, Severe acute respiratory syndrome coronavirus 2
VAKYTQLCQYLNTLTLAV

SEQ ID NO: 96020 - protein, 18 aa, Severe acute respiratory syndrome coronavirus 2
AKYTQLCQYLNTLTLAVP

SEQ ID NO: 96021 - protein, 18 aa, Severe acute respiratory syndrome coronavirus 2
KYTQLCQYLNTLTLAVPY

SEQ ID NO: 96022 - protein, 18 aa, Severe acute respiratory syndrome coronavirus 2
YTQLCQYLNTLTLAVPYN

SEQ ID NO: 96023 - protein, 18 aa, Severe acute respiratory syndrome coronavirus 2
LTLAVPYNMRVIHFGAGS

SEQ ID NO: 96024 - protein, 18 aa, Severe acute respiratory syndrome coronavirus 2
TLAVPYNMRVIHFGAGSD

SEQ ID NO: 96025 - protein, 18 aa, Severe acute respiratory syndrome coronavirus 2
LAVPYNMRVIHFGAGSDK

SEQ ID NO: 96026 - protein, 18 aa, Severe acute respiratory syndrome coronavirus 2
VAPGTAVLRQWLPTGTLL

SEQ ID NO: 96027 - protein, 18 aa, Severe acute respiratory syndrome coronavirus 2
APGTAVLRQWLPTGTLLV

SEQ ID NO: 96028 - protein, 18 aa, Severe acute respiratory syndrome coronavirus 2
PGTAVLRQWLPTGTLLVD

SEQ ID NO: 96029 - protein, 18 aa, Severe acute respiratory syndrome coronavirus 2
GTAVLRQWLPTGTLLVDS

SEQ ID NO: 96030 - protein, 18 aa, Severe acute respiratory syndrome coronavirus 2
TAVLRQWLPTGTLLVDSD

SEQ ID NO: 96031 - protein, 18 aa, Severe acute respiratory syndrome coronavirus 2
AVLRQWLPTGTLLVDSDL

SEQ ID NO: 96032 - protein, 18 aa, Severe acute respiratory syndrome coronavirus 2
VLRQWLPTGTLLVDSDLN

SEQ ID NO: 96033 - protein, 18 aa, Severe acute respiratory syndrome coronavirus 2
LRQWLPTGTLLVDSDLND

SEQ ID NO: 96034 - protein, 18 aa, Severe acute respiratory syndrome coronavirus 2
RQWLPTGTLLVDSDLNDF

SEQ ID NO: 96035 - protein, 18 aa, Severe acute respiratory syndrome coronavirus 2
QWLPTGTLLVDSDLNDFV

SEQ ID NO: 96036 - protein, 18 aa, Severe acute respiratory syndrome coronavirus 2
WLPTGTLLVDSDLNDFVS

SEQ ID NO: 96037 - protein, 18 aa, Severe acute respiratory syndrome coronavirus 2
LALGGSVAIKITEHSWNA

SEQ ID NO: 96038 - protein, 18 aa, Severe acute respiratory syndrome coronavirus 2
AIKITEHSWNADLYKLMG

SEQ ID NO: 96039 - protein, 18 aa, Severe acute respiratory syndrome coronavirus 2
IKITEHSWNADLYKLMGH

SEQ ID NO: 96040 - protein, 18 aa, Severe acute respiratory syndrome coronavirus 2
KITEHSWNADLYKLMGHF

SEQ ID NO: 96041 - protein, 18 aa, Severe acute respiratory syndrome coronavirus 2
LSSYSLFDMSKFPLKLRG

SEQ ID NO: 96042 - protein, 18 aa, Severe acute respiratory syndrome coronavirus 2
SSYSLFDMSKFPLKLRGT

SEQ ID NO: 96043 - protein, 18 aa, Severe acute respiratory syndrome coronavirus 2
SYSLFDMSKFPLKLRGTA

SEQ ID NO: 96044 - protein, 18 aa, Severe acute respiratory syndrome coronavirus 2
YSLFDMSKFPLKLRGTAV

SEQ ID NO: 96045 - protein, 18 aa, Severe acute respiratory syndrome coronavirus 2
SLFDMSKFPLKLRGTAVM

SEQ ID NO: 96046 - protein, 18 aa, Severe acute respiratory syndrome coronavirus 2
LFDMSKFPLKLRGTAVMS

SEQ ID NO: 96047 - protein, 18 aa, Severe acute respiratory syndrome coronavirus 2
FDMSKFPLKLRGTAVMSL

SEQ ID NO: 96048 - protein, 18 aa, Severe acute respiratory syndrome coronavirus 2
DMSKFPLKLRGTAVMSLK

SEQ ID NO: 96049 - protein, 18 aa, Severe acute respiratory syndrome coronavirus 2
MSKFPLKLRGTAVMSLKE

SEQ ID NO: 96050 - protein, 18 aa, Severe acute respiratory syndrome coronavirus 2
QINDMILSLLSKGRLIIR

SEQ ID NO: 96051 - protein, 18 aa, Severe acute respiratory syndrome coronavirus 2
INDMILSLLSKGRLIIRE

SEQ ID NO: 96052 - protein, 18 aa, Severe acute respiratory syndrome coronavirus 2
NDMILSLLSKGRLIIREN

SEQ ID NO: 96053 - protein, 18 aa, Severe acute respiratory syndrome coronavirus 2
DMILSLLSKGRLIIRENN

SEQ ID NO: 96054 - protein, 18 aa, Severe acute respiratory syndrome coronavirus 2
MILSLLSKGRLIIRENNR

SEQ ID NO: 96055 - protein, 19 aa, Severe acute respiratory syndrome coronavirus 2
DEDDNLIDSYFVVKRHTFS

SEQ ID NO: 96056 - protein, 19 aa, Severe acute respiratory syndrome coronavirus 2
EDDNLIDSYFVVKRHTFSN

SEQ ID NO: 96057 - protein, 19 aa, Severe acute respiratory syndrome coronavirus 2
LIDSYFVVKRHTFSNYQHE

SEQ ID NO: 96058 - protein, 19 aa, Severe acute respiratory syndrome coronavirus 2
IDSYFVVKRHTFSNYQHEE

SEQ ID NO: 96059 - protein, 19 aa, Severe acute respiratory syndrome coronavirus 2
KHDFFKFRIDGDMVPHISR

SEQ ID NO: 96060 - protein, 19 aa, Severe acute respiratory syndrome coronavirus 2
HDFFKFRIDGDMVPHISRQ

SEQ ID NO: 96061 - protein, 19 aa, Severe acute respiratory syndrome coronavirus 2
DFFKFRIDGDMVPHISRQR

SEQ ID NO: 96062 - protein, 19 aa, Severe acute respiratory syndrome coronavirus 2
FFKFRIDGDMVPHISRQRL

SEQ ID NO: 96063 - protein, 19 aa, Severe acute respiratory syndrome coronavirus 2
FKFRIDGDMVPHISRQRLT

SEQ ID NO: 96064 - protein, 19 aa, Severe acute respiratory syndrome coronavirus 2
KFRIDGDMVPHISRQRLTK

SEQ ID NO: 96065 - protein, 19 aa, Severe acute respiratory syndrome coronavirus 2
FRIDGDMVPHISRQRLTKY

SEQ ID NO: 96066 - protein, 19 aa, Severe acute respiratory syndrome coronavirus 2
RIDGDMVPHISRQRLTKYT

SEQ ID NO: 96067 - protein, 19 aa, Severe acute respiratory syndrome coronavirus 2
IDGDMVPHISRQRLTKYTM

SEQ ID NO: 96068 - protein, 19 aa, Severe acute respiratory syndrome coronavirus 2
DGDMVPHISRQRLTKYTMA

SEQ ID NO: 96069 - protein, 19 aa, Severe acute respiratory syndrome coronavirus 2
GDMVPHISRQRLTKYTMAD

SEQ ID NO: 96070 - protein, 19 aa, Severe acute respiratory syndrome coronavirus 2
DMVPHISRQRLTKYTMADL

SEQ ID NO: 96071 - protein, 19 aa, Severe acute respiratory syndrome coronavirus 2
VPHISRQRLTKYTMADLVY

SEQ ID NO: 96072 - protein, 19 aa, Severe acute respiratory syndrome coronavirus 2
PHISRQRLTKYTMADLVYA

SEQ ID NO: 96073 - protein, 19 aa, Severe acute respiratory syndrome coronavirus 2
HISRQRLTKYTMADLVYAL

SEQ ID NO: 96074 - protein, 19 aa, Severe acute respiratory syndrome coronavirus 2
ISRQRLTKYTMADLVYALR

SEQ ID NO: 96075 - protein, 19 aa, Severe acute respiratory syndrome coronavirus 2
SRQRLTKYTMADLVYALRH

SEQ ID NO: 96076 - protein, 19 aa, Severe acute respiratory syndrome coronavirus 2
RQRLTKYTMADLVYALRHF

SEQ ID NO: 96077 - protein, 19 aa, Severe acute respiratory syndrome coronavirus 2
QRLTKYTMADLVYALRHFD

SEQ ID NO: 96078 - protein, 19 aa, Severe acute respiratory syndrome coronavirus 2
RLTKYTMADLVYALRHFDE

SEQ ID NO: 96079 - protein, 19 aa, Severe acute respiratory syndrome coronavirus 2
LTKYTMADLVYALRHFDEG

SEQ ID NO: 96080 - protein, 19 aa, Severe acute respiratory syndrome coronavirus 2
TKYTMADLVYALRHFDEGN

SEQ ID NO: 96081 - protein, 19 aa, Severe acute respiratory syndrome coronavirus 2
KYTMADLVYALRHFDEGNC

SEQ ID NO: 96082 - protein, 19 aa, Severe acute respiratory syndrome coronavirus 2
YTMADLVYALRHFDEGNCD

SEQ ID NO: 96083 - protein, 19 aa, Severe acute respiratory syndrome coronavirus 2
LKEILVTYNCCDDDYFNKK

SEQ ID NO: 96084 - protein, 19 aa, Severe acute respiratory syndrome coronavirus 2
VQFCDAMRNAGIVGVLTLD

SEQ ID NO: 96085 - protein, 19 aa, Severe acute respiratory syndrome coronavirus 2
QFCDAMRNAGIVGVLTLDN

SEQ ID NO: 96086 - protein, 19 aa, Severe acute respiratory syndrome coronavirus 2
FCDAMRNAGIVGVLTLDNQ

SEQ ID NO: 96087 - protein, 19 aa, Severe acute respiratory syndrome coronavirus 2
CDAMRNAGIVGVLTLDNQD

SEQ ID NO: 96088 - protein, 19 aa, Severe acute respiratory syndrome coronavirus 2
DAMRNAGIVGVLTLDNQDL

SEQ ID NO: 96089 - protein, 19 aa, Severe acute respiratory syndrome coronavirus 2
AMRNAGIVGVLTLDNQDLN

SEQ ID NO: 96090 - protein, 19 aa, Severe acute respiratory syndrome coronavirus 2
MRNAGIVGVLTLDNQDLNG

SEQ ID NO: 96091 - protein, 19 aa, Severe acute respiratory syndrome coronavirus 2
RNAGIVGVLTLDNQDLNGN

SEQ ID NO: 96092 - protein, 19 aa, Severe acute respiratory syndrome coronavirus 2
NAGIVGVLTLDNQDLNGNW

SEQ ID NO: 96093 - protein, 19 aa, Severe acute respiratory syndrome coronavirus 2
AGIVGVLTLDNQDLNGNWY

SEQ ID NO: 96094 - protein, 19 aa, Severe acute respiratory syndrome coronavirus 2
GIVGVLTLDNQDLNGNWYD

SEQ ID NO: 96095 - protein, 19 aa, Severe acute respiratory syndrome coronavirus 2
IVGVLTLDNQDLNGNWYDF

SEQ ID NO: 96096 - protein, 19 aa, Severe acute respiratory syndrome coronavirus 2
VGVLTLDNQDLNGNWYDFG

SEQ ID NO: 96097 - protein, 19 aa, Severe acute respiratory syndrome coronavirus 2
SHVDTDLTKPYIKWDLLKY

SEQ ID NO: 96098 - protein, 19 aa, Severe acute respiratory syndrome coronavirus 2
HVDTDLTKPYIKWDLLKYD

SEQ ID NO: 96099 - protein, 19 aa, Severe acute respiratory syndrome coronavirus 2
VDTDLTKPYIKWDLLKYDF

SEQ ID NO: 96100 - protein, 19 aa, Severe acute respiratory syndrome coronavirus 2
DTDLTKPYIKWDLLKYDFT

SEQ ID NO: 96101 - protein, 19 aa, Severe acute respiratory syndrome coronavirus 2
TDLTKPYIKWDLLKYDFTE

SEQ ID NO: 96102 - protein, 19 aa, Severe acute respiratory syndrome coronavirus 2
DRCILHCANFNVLFSTVFP

SEQ ID NO: 96103 - protein, 19 aa, Severe acute respiratory syndrome coronavirus 2
VRKIFVDGVPFVVSTGYHF

SEQ ID NO: 96104 - protein, 19 aa, Severe acute respiratory syndrome coronavirus 2
RKIFVDGVPFVVSTGYHFR

SEQ ID NO: 96105 - protein, 19 aa, Severe acute respiratory syndrome coronavirus 2
KIFVDGVPFVVSTGYHFRE

SEQ ID NO: 96106 - protein, 19 aa, Severe acute respiratory syndrome coronavirus 2
IFVDGVPFVVSTGYHFREL

SEQ ID NO: 96107 - protein, 19 aa, Severe acute respiratory syndrome coronavirus 2
FVDGVPFVVSTGYHFRELG

SEQ ID NO: 96108 - protein, 19 aa, Severe acute respiratory syndrome coronavirus 2
VDGVPFVVSTGYHFRELGV

SEQ ID NO: 96109 - protein, 19 aa, Severe acute respiratory syndrome coronavirus 2
DGVPFVVSTGYHFRELGVV

SEQ ID NO: 96110 - protein, 19 aa, Severe acute respiratory syndrome coronavirus 2
GVPFVVSTGYHFRELGVVH

SEQ ID NO: 96111 - protein, 19 aa, Severe acute respiratory syndrome coronavirus 2
VPFVVSTGYHFRELGVVHN

SEQ ID NO: 96112 - protein, 19 aa, Severe acute respiratory syndrome coronavirus 2
DVNLHSSRLSFKELLVYAA

SEQ ID NO: 96113 - protein, 19 aa, Severe acute respiratory syndrome coronavirus 2
VNLHSSRLSFKELLVYAAD

SEQ ID NO: 96114 - protein, 19 aa, Severe acute respiratory syndrome coronavirus 2
NLHSSRLSFKELLVYAADP

SEQ ID NO: 96115 - protein, 19 aa, Severe acute respiratory syndrome coronavirus 2
LHSSRLSFKELLVYAADPA

SEQ ID NO: 96116 - protein, 19 aa, Severe acute respiratory syndrome coronavirus 2
AFQTVKPGNFNKDFYDFAV

SEQ ID NO: 96117 - protein, 19 aa, Severe acute respiratory syndrome coronavirus 2
FQTVKPGNFNKDFYDFAVS

SEQ ID NO: 96118 - protein, 19 aa, Severe acute respiratory syndrome coronavirus 2
ISDYDYYRYNLPTMCDIRQ

SEQ ID NO: 96119 - protein, 19 aa, Severe acute respiratory syndrome coronavirus 2
SDYDYYRYNLPTMCDIRQL

SEQ ID NO: 96120 - protein, 19 aa, Severe acute respiratory syndrome coronavirus 2
DYDYYRYNLPTMCDIRQLL

SEQ ID NO: 96121 - protein, 19 aa, Severe acute respiratory syndrome coronavirus 2
YDYYRYNLPTMCDIRQLLF

SEQ ID NO: 96122 - protein, 19 aa, Severe acute respiratory syndrome coronavirus 2
QVIVNNLDKSAGFPFNKWG

SEQ ID NO: 96123 - protein, 19 aa, Severe acute respiratory syndrome coronavirus 2
VIVNNLDKSAGFPFNKWGK

SEQ ID NO: 96124 - protein, 19 aa, Severe acute respiratory syndrome coronavirus 2
IVNNLDKSAGFPFNKWGKA

SEQ ID NO: 96125 - protein, 19 aa, Severe acute respiratory syndrome coronavirus 2
VNNLDKSAGFPFNKWGKAR

SEQ ID NO: 96126 - protein, 19 aa, Severe acute respiratory syndrome coronavirus 2
YTKRNVIPTITQMNLKYAI

SEQ ID NO: 96127 - protein, 19 aa, Severe acute respiratory syndrome coronavirus 2
TKRNVIPTITQMNLKYAIS

SEQ ID NO: 96128 - protein, 19 aa, Severe acute respiratory syndrome coronavirus 2
KRNVIPTITQMNLKYAISA

SEQ ID NO: 96129 - protein, 19 aa, Severe acute respiratory syndrome coronavirus 2
RNVIPTITQMNLKYAISAK

SEQ ID NO: 96130 - protein, 19 aa, Severe acute respiratory syndrome coronavirus 2
NVIPTITQMNLKYAISAKN

SEQ ID NO: 96131 - protein, 19 aa, Severe acute respiratory syndrome coronavirus 2
VIPTITQMNLKYAISAKNR

SEQ ID NO: 96132 - protein, 19 aa, Severe acute respiratory syndrome coronavirus 2
IPTITQMNLKYAISAKNRA

SEQ ID NO: 96133 - protein, 19 aa, Severe acute respiratory syndrome coronavirus 2
PTITQMNLKYAISAKNRAR

SEQ ID NO: 96134 - protein, 19 aa, Severe acute respiratory syndrome coronavirus 2
TITQMNLKYAISAKNRART

SEQ ID NO: 96135 - protein, 19 aa, Severe acute respiratory syndrome coronavirus 2
ITQMNLKYAISAKNRARTV

SEQ ID NO: 96136 - protein, 19 aa, Severe acute respiratory syndrome coronavirus 2
TQMNLKYAISAKNRARTVA

SEQ ID NO: 96137 - protein, 19 aa, Severe acute respiratory syndrome coronavirus 2
QMNLKYAISAKNRARTVAG

SEQ ID NO: 96138 - protein, 19 aa, Severe acute respiratory syndrome coronavirus 2
MNLKYAISAKNRARTVAGV

SEQ ID NO: 96139 - protein, 19 aa, Severe acute respiratory syndrome coronavirus 2
NLKYAISAKNRARTVAGVS

SEQ ID NO: 96140 - protein, 19 aa, Severe acute respiratory syndrome coronavirus 2
LKYAISAKNRARTVAGVSI

SEQ ID NO: 96141 - protein, 19 aa, Severe acute respiratory syndrome coronavirus 2
KYAISAKNRARTVAGVSIC

SEQ ID NO: 96142 - protein, 19 aa, Severe acute respiratory syndrome coronavirus 2
YAISAKNRARTVAGVSICS

SEQ ID NO: 96143 - protein, 19 aa, Severe acute respiratory syndrome coronavirus 2
AISAKNRARTVAGVSICST

SEQ ID NO: 96144 - protein, 19 aa, Severe acute respiratory syndrome coronavirus 2
ISAKNRARTVAGVSICSTM

SEQ ID NO: 96145 - protein, 19 aa, Severe acute respiratory syndrome coronavirus 2
SAKNRARTVAGVSICSTMT

SEQ ID NO: 96146 - protein, 19 aa, Severe acute respiratory syndrome coronavirus 2
AKNRARTVAGVSICSTMTN

SEQ ID NO: 96147 - protein, 19 aa, Severe acute respiratory syndrome coronavirus 2
KNRARTVAGVSICSTMTNR

SEQ ID NO: 96148 - protein, 19 aa, Severe acute respiratory syndrome coronavirus 2
NRARTVAGVSICSTMTNRQ

SEQ ID NO: 96149 - protein, 19 aa, Severe acute respiratory syndrome coronavirus 2
RARTVAGVSICSTMTNRQF

SEQ ID NO: 96150 - protein, 19 aa, Severe acute respiratory syndrome coronavirus 2
ARTVAGVSICSTMTNRQFH

SEQ ID NO: 96151 - protein, 19 aa, Severe acute respiratory syndrome coronavirus 2
RTVAGVSICSTMTNRQFHQ

SEQ ID NO: 96152 - protein, 19 aa, Severe acute respiratory syndrome coronavirus 2
TVAGVSICSTMTNRQFHQK

SEQ ID NO: 96153 - protein, 19 aa, Severe acute respiratory syndrome coronavirus 2
VAGVSICSTMTNRQFHQKL

SEQ ID NO: 96154 - protein, 19 aa, Severe acute respiratory syndrome coronavirus 2
AGVSICSTMTNRQFHQKLL

SEQ ID NO: 96155 - protein, 19 aa, Severe acute respiratory syndrome coronavirus 2
GVSICSTMTNRQFHQKLLK

SEQ ID NO: 96156 - protein, 19 aa, Severe acute respiratory syndrome coronavirus 2
VSICSTMTNRQFHQKLLKS

SEQ ID NO: 96157 - protein, 19 aa, Severe acute respiratory syndrome coronavirus 2
SICSTMTNRQFHQKLLKSI

SEQ ID NO: 96158 - protein, 19 aa, Severe acute respiratory syndrome coronavirus 2
ICSTMTNRQFHQKLLKSIA

SEQ ID NO: 96159 - protein, 19 aa, Severe acute respiratory syndrome coronavirus 2
CSTMTNRQFHQKLLKSIAA

SEQ ID NO: 96160 - protein, 19 aa, Severe acute respiratory syndrome coronavirus 2
STMTNRQFHQKLLKSIAAT

SEQ ID NO: 96161 - protein, 19 aa, Severe acute respiratory syndrome coronavirus 2
TMTNRQFHQKLLKSIAATR

SEQ ID NO: 96162 - protein, 19 aa, Severe acute respiratory syndrome coronavirus 2
MTNRQFHQKLLKSIAATRG

SEQ ID NO: 96163 - protein, 19 aa, Severe acute respiratory syndrome coronavirus 2
TNRQFHQKLLKSIAATRGA

SEQ ID NO: 96164 - protein, 19 aa, Severe acute respiratory syndrome coronavirus 2
NRQFHQKLLKSIAATRGAT

SEQ ID NO: 96165 - protein, 19 aa, Severe acute respiratory syndrome coronavirus 2
CGGSLYVKPGGTSSGDATT

SEQ ID NO: 96166 - protein, 19 aa, Severe acute respiratory syndrome coronavirus 2
GGSLYVKPGGTSSGDATTA

SEQ ID NO: 96167 - protein, 19 aa, Severe acute respiratory syndrome coronavirus 2
GSLYVKPGGTSSGDATTAY

SEQ ID NO: 96168 - protein, 19 aa, Severe acute respiratory syndrome coronavirus 2
SLYVKPGGTSSGDATTAYA

SEQ ID NO: 96169 - protein, 19 aa, Severe acute respiratory syndrome coronavirus 2
LYVKPGGTSSGDATTAYAN

SEQ ID NO: 96170 - protein, 19 aa, Severe acute respiratory syndrome coronavirus 2
YVKPGGTSSGDATTAYANS

SEQ ID NO: 96171 - protein, 19 aa, Severe acute respiratory syndrome coronavirus 2
VKPGGTSSGDATTAYANSV

SEQ ID NO: 96172 - protein, 19 aa, Severe acute respiratory syndrome coronavirus 2
KPGGTSSGDATTAYANSVF

SEQ ID NO: 96173 - protein, 19 aa, Severe acute respiratory syndrome coronavirus 2
PGGTSSGDATTAYANSVFN

SEQ ID NO: 96174 - protein, 19 aa, Severe acute respiratory syndrome coronavirus 2
GGTSSGDATTAYANSVFNI

SEQ ID NO: 96175 - protein, 19 aa, Severe acute respiratory syndrome coronavirus 2
GTSSGDATTAYANSVFNIC

SEQ ID NO: 96176 - protein, 19 aa, Severe acute respiratory syndrome coronavirus 2
TSSGDATTAYANSVFNICQ

SEQ ID NO: 96177 - protein, 19 aa, Severe acute respiratory syndrome coronavirus 2
SSGDATTAYANSVFNICQA

SEQ ID NO: 96178 - protein, 19 aa, Severe acute respiratory syndrome coronavirus 2
SGDATTAYANSVFNICQAV

SEQ ID NO: 96179 - protein, 19 aa, Severe acute respiratory syndrome coronavirus 2
GDATTAYANSVFNICQAVT

SEQ ID NO: 96180 - protein, 19 aa, Severe acute respiratory syndrome coronavirus 2
DATTAYANSVFNICQAVTA

SEQ ID NO: 96181 - protein, 19 aa, Severe acute respiratory syndrome coronavirus 2
ATTAYANSVFNICQAVTAN

SEQ ID NO: 96182 - protein, 19 aa, Severe acute respiratory syndrome coronavirus 2
TTAYANSVFNICQAVTANV

SEQ ID NO: 96183 - protein, 19 aa, Severe acute respiratory syndrome coronavirus 2
TAYANSVFNICQAVTANVN

SEQ ID NO: 96184 - protein, 19 aa, Severe acute respiratory syndrome coronavirus 2
AYANSVFNICQAVTANVNA

SEQ ID NO: 96185 - protein, 19 aa, Severe acute respiratory syndrome coronavirus 2
YANSVFNICQAVTANVNAL

SEQ ID NO: 96186 - protein, 19 aa, Severe acute respiratory syndrome coronavirus 2
ANSVFNICQAVTANVNALL

SEQ ID NO: 96187 - protein, 19 aa, Severe acute respiratory syndrome coronavirus 2
NSVFNICQAVTANVNALLS

SEQ ID NO: 96188 - protein, 19 aa, Severe acute respiratory syndrome coronavirus 2
SVFNICQAVTANVNALLST

SEQ ID NO: 96189 - protein, 19 aa, Severe acute respiratory syndrome coronavirus 2
VFNICQAVTANVNALLSTD

SEQ ID NO: 96190 - protein, 19 aa, Severe acute respiratory syndrome coronavirus 2
FNICQAVTANVNALLSTDG

SEQ ID NO: 96191 - protein, 19 aa, Severe acute respiratory syndrome coronavirus 2
NICQAVTANVNALLSTDGN

SEQ ID NO: 96192 - protein, 19 aa, Severe acute respiratory syndrome coronavirus 2
ICQAVTANVNALLSTDGNK

SEQ ID NO: 96193 - protein, 19 aa, Severe acute respiratory syndrome coronavirus 2
CQAVTANVNALLSTDGNKI

SEQ ID NO: 96194 - protein, 19 aa, Severe acute respiratory syndrome coronavirus 2
QAVTANVNALLSTDGNKIA

SEQ ID NO: 96195 - protein, 19 aa, Severe acute respiratory syndrome coronavirus 2
AVTANVNALLSTDGNKIAD

SEQ ID NO: 96196 - protein, 19 aa, Severe acute respiratory syndrome coronavirus 2
VTANVNALLSTDGNKIADK

SEQ ID NO: 96197 - protein, 19 aa, Severe acute respiratory syndrome coronavirus 2
TANVNALLSTDGNKIADKY

SEQ ID NO: 96198 - protein, 19 aa, Severe acute respiratory syndrome coronavirus 2
ANVNALLSTDGNKIADKYV

SEQ ID NO: 96199 - protein, 19 aa, Severe acute respiratory syndrome coronavirus 2
NVNALLSTDGNKIADKYVR

SEQ ID NO: 96200 - protein, 19 aa, Severe acute respiratory syndrome coronavirus 2
VNALLSTDGNKIADKYVRN

SEQ ID NO: 96201 - protein, 19 aa, Severe acute respiratory syndrome coronavirus 2
NALLSTDGNKIADKYVRNL

SEQ ID NO: 96202 - protein, 19 aa, Severe acute respiratory syndrome coronavirus 2
ALLSTDGNKIADKYVRNLQ

SEQ ID NO: 96203 - protein, 19 aa, Severe acute respiratory syndrome coronavirus 2
STDGNKIADKYVRNLQHRL

SEQ ID NO: 96204 - protein, 19 aa, Severe acute respiratory syndrome coronavirus 2
TDGNKIADKYVRNLQHRLY

SEQ ID NO: 96205 - protein, 19 aa, Severe acute respiratory syndrome coronavirus 2
DGNKIADKYVRNLQHRLYE

SEQ ID NO: 96206 - protein, 19 aa, Severe acute respiratory syndrome coronavirus 2
GNKIADKYVRNLQHRLYEC

SEQ ID NO: 96207 - protein, 19 aa, Severe acute respiratory syndrome coronavirus 2
NKIADKYVRNLQHRLYECL

SEQ ID NO: 96208 - protein, 19 aa, Severe acute respiratory syndrome coronavirus 2
KIADKYVRNLQHRLYECLY

SEQ ID NO: 96209 - protein, 19 aa, Severe acute respiratory syndrome coronavirus 2
IADKYVRNLQHRLYECLYR

SEQ ID NO: 96210 - protein, 19 aa, Severe acute respiratory syndrome coronavirus 2
FYAYLRKHFSMMILSDDAV

SEQ ID NO: 96211 - protein, 19 aa, Severe acute respiratory syndrome coronavirus 2
YAYLRKHFSMMILSDDAVV

SEQ ID NO: 96212 - protein, 19 aa, Severe acute respiratory syndrome coronavirus 2
AYLRKHFSMMILSDDAVVC

SEQ ID NO: 96213 - protein, 19 aa, Severe acute respiratory syndrome coronavirus 2
YLRKHFSMMILSDDAVVCF

SEQ ID NO: 96214 - protein, 19 aa, Severe acute respiratory syndrome coronavirus 2
LVASIKNFKSVLYYQNNVF

SEQ ID NO: 96215 - protein, 19 aa, Severe acute respiratory syndrome coronavirus 2
VASIKNFKSVLYYQNNVFM

SEQ ID NO: 96216 - protein, 19 aa, Severe acute respiratory syndrome coronavirus 2
ASIKNFKSVLYYQNNVFMS

SEQ ID NO: 96217 - protein, 19 aa, Severe acute respiratory syndrome coronavirus 2
SIKNFKSVLYYQNNVFMSE

SEQ ID NO: 96218 - protein, 19 aa, Severe acute respiratory syndrome coronavirus 2
IKNFKSVLYYQNNVFMSEA

SEQ ID NO: 96219 - protein, 19 aa, Severe acute respiratory syndrome coronavirus 2
KNFKSVLYYQNNVFMSEAK

SEQ ID NO: 96220 - protein, 19 aa, Severe acute respiratory syndrome coronavirus 2
NFKSVLYYQNNVFMSEAKC

SEQ ID NO: 96221 - protein, 19 aa, Severe acute respiratory syndrome coronavirus 2
FKSVLYYQNNVFMSEAKCW

SEQ ID NO: 96222 - protein, 19 aa, Severe acute respiratory syndrome coronavirus 2
KSVLYYQNNVFMSEAKCWT

SEQ ID NO: 96223 - protein, 19 aa, Severe acute respiratory syndrome coronavirus 2
SVLYYQNNVFMSEAKCWTE

SEQ ID NO: 96224 - protein, 19 aa, Severe acute respiratory syndrome coronavirus 2
VLYYQNNVFMSEAKCWTET

SEQ ID NO: 96225 - protein, 19 aa, Severe acute respiratory syndrome coronavirus 2
LYYQNNVFMSEAKCWTETD

SEQ ID NO: 96226 - protein, 19 aa, Severe acute respiratory syndrome coronavirus 2
YYQNNVFMSEAKCWTETDL

SEQ ID NO: 96227 - protein, 19 aa, Severe acute respiratory syndrome coronavirus 2
YPDPSRILGAGCFVDDIVK

SEQ ID NO: 96228 - protein, 19 aa, Severe acute respiratory syndrome coronavirus 2
PSRILGAGCFVDDIVKTDG

SEQ ID NO: 96229 - protein, 19 aa, Severe acute respiratory syndrome coronavirus 2
SRILGAGCFVDDIVKTDGT

SEQ ID NO: 96230 - protein, 19 aa, Severe acute respiratory syndrome coronavirus 2
RILGAGCFVDDIVKTDGTL

SEQ ID NO: 96231 - protein, 19 aa, Severe acute respiratory syndrome coronavirus 2
ILGAGCFVDDIVKTDGTLM

SEQ ID NO: 96232 - protein, 19 aa, Severe acute respiratory syndrome coronavirus 2
LGAGCFVDDIVKTDGTLMI

SEQ ID NO: 96233 - protein, 19 aa, Severe acute respiratory syndrome coronavirus 2
GAGCFVDDIVKTDGTLMIE

SEQ ID NO: 96234 - protein, 19 aa, Severe acute respiratory syndrome coronavirus 2
AGCFVDDIVKTDGTLMIER

SEQ ID NO: 96235 - protein, 19 aa, Severe acute respiratory syndrome coronavirus 2
GCFVDDIVKTDGTLMIERF

SEQ ID NO: 96236 - protein, 19 aa, Severe acute respiratory syndrome coronavirus 2
CFVDDIVKTDGTLMIERFV

SEQ ID NO: 96237 - protein, 19 aa, Severe acute respiratory syndrome coronavirus 2
FVDDIVKTDGTLMIERFVS

SEQ ID NO: 96238 - protein, 19 aa, Severe acute respiratory syndrome coronavirus 2
VDDIVKTDGTLMIERFVSL

SEQ ID NO: 96239 - protein, 19 aa, Severe acute respiratory syndrome coronavirus 2
DDIVKTDGTLMIERFVSLA

SEQ ID NO: 96240 - protein, 19 aa, Severe acute respiratory syndrome coronavirus 2
DIVKTDGTLMIERFVSLAI

SEQ ID NO: 96241 - protein, 19 aa, Severe acute respiratory syndrome coronavirus 2
IVKTDGTLMIERFVSLAID

SEQ ID NO: 96242 - protein, 19 aa, Severe acute respiratory syndrome coronavirus 2
VKTDGTLMIERFVSLAIDA

SEQ ID NO: 96243 - protein, 19 aa, Severe acute respiratory syndrome coronavirus 2
KTDGTLMIERFVSLAIDAY

SEQ ID NO: 96244 - protein, 19 aa, Severe acute respiratory syndrome coronavirus 2
TDGTLMIERFVSLAIDAYP

SEQ ID NO: 96245 - protein, 19 aa, Severe acute respiratory syndrome coronavirus 2
DGTLMIERFVSLAIDAYPL

SEQ ID NO: 96246 - protein, 19 aa, Severe acute respiratory syndrome coronavirus 2
ISFPLCANGQVFGLYKNTC

SEQ ID NO: 96247 - protein, 19 aa, Severe acute respiratory syndrome coronavirus 2
SFPLCANGQVFGLYKNTCV

SEQ ID NO: 96248 - protein, 19 aa, Severe acute respiratory syndrome coronavirus 2
FPLCANGQVFGLYKNTCVG

SEQ ID NO: 96249 - protein, 19 aa, Severe acute respiratory syndrome coronavirus 2
LCANGQVFGLYKNTCVGSD

SEQ ID NO: 96250 - protein, 19 aa, Severe acute respiratory syndrome coronavirus 2
TDFNAIATCDWTNAGDYIL

SEQ ID NO: 96251 - protein, 19 aa, Severe acute respiratory syndrome coronavirus 2
DFNAIATCDWTNAGDYILA

SEQ ID NO: 96252 - protein, 19 aa, Severe acute respiratory syndrome coronavirus 2
FNAIATCDWTNAGDYILAN

SEQ ID NO: 96253 - protein, 19 aa, Severe acute respiratory syndrome coronavirus 2
NAIATCDWTNAGDYILANT

SEQ ID NO: 96254 - protein, 19 aa, Severe acute respiratory syndrome coronavirus 2
AIATCDWTNAGDYILANTC

SEQ ID NO: 96255 - protein, 19 aa, Severe acute respiratory syndrome coronavirus 2
EETFKLSYGIATVREVLSD

SEQ ID NO: 96256 - protein, 19 aa, Severe acute respiratory syndrome coronavirus 2
ETFKLSYGIATVREVLSDR

SEQ ID NO: 96257 - protein, 19 aa, Severe acute respiratory syndrome coronavirus 2
TFKLSYGIATVREVLSDRE

SEQ ID NO: 96258 - protein, 19 aa, Severe acute respiratory syndrome coronavirus 2
FKLSYGIATVREVLSDREL

SEQ ID NO: 96259 - protein, 19 aa, Severe acute respiratory syndrome coronavirus 2
RPPLNRNYVFTGYRVTKNS

SEQ ID NO: 96260 - protein, 19 aa, Severe acute respiratory syndrome coronavirus 2
PPLNRNYVFTGYRVTKNSK

SEQ ID NO: 96261 - protein, 19 aa, Severe acute respiratory syndrome coronavirus 2
VYTACSHAAVDALCEKALK

SEQ ID NO: 96262 - protein, 19 aa, Severe acute respiratory syndrome coronavirus 2
YTACSHAAVDALCEKALKY

SEQ ID NO: 96263 - protein, 19 aa, Severe acute respiratory syndrome coronavirus 2
TACSHAAVDALCEKALKYL

SEQ ID NO: 96264 - protein, 19 aa, Severe acute respiratory syndrome coronavirus 2
HAAVDALCEKALKYLPIDK

SEQ ID NO: 96265 - protein, 19 aa, Severe acute respiratory syndrome coronavirus 2
AAVDALCEKALKYLPIDKC

SEQ ID NO: 96266 - protein, 19 aa, Severe acute respiratory syndrome coronavirus 2
AVDALCEKALKYLPIDKCS

SEQ ID NO: 96267 - protein, 19 aa, Severe acute respiratory syndrome coronavirus 2
VDALCEKALKYLPIDKCSR

SEQ ID NO: 96268 - protein, 19 aa, Severe acute respiratory syndrome coronavirus 2
DALCEKALKYLPIDKCSRI

SEQ ID NO: 96269 - protein, 19 aa, Severe acute respiratory syndrome coronavirus 2
ALCEKALKYLPIDKCSRII

SEQ ID NO: 96270 - protein, 19 aa, Severe acute respiratory syndrome coronavirus 2
LCEKALKYLPIDKCSRIIP

SEQ ID NO: 96271 - protein, 19 aa, Severe acute respiratory syndrome coronavirus 2
CEKALKYLPIDKCSRIIPA

SEQ ID NO: 96272 - protein, 19 aa, Severe acute respiratory syndrome coronavirus 2
EKALKYLPIDKCSRIIPAR

SEQ ID NO: 96273 - protein, 19 aa, Severe acute respiratory syndrome coronavirus 2
KALKYLPIDKCSRIIPARA

SEQ ID NO: 96274 - protein, 19 aa, Severe acute respiratory syndrome coronavirus 2
ALKYLPIDKCSRIIPARAR

SEQ ID NO: 96275 - protein, 19 aa, Severe acute respiratory syndrome coronavirus 2
LKYLPIDKCSRIIPARARV

SEQ ID NO: 96276 - protein, 19 aa, Severe acute respiratory syndrome coronavirus 2
KYLPIDKCSRIIPARARVE

SEQ ID NO: 96277 - protein, 19 aa, Severe acute respiratory syndrome coronavirus 2
YLPIDKCSRIIPARARVEC

SEQ ID NO: 96278 - protein, 19 aa, Severe acute respiratory syndrome coronavirus 2
LPIDKCSRIIPARARVECF

SEQ ID NO: 96279 - protein, 19 aa, Severe acute respiratory syndrome coronavirus 2
PIDKCSRIIPARARVECFD

SEQ ID NO: 96280 - protein, 19 aa, Severe acute respiratory syndrome coronavirus 2
IDKCSRIIPARARVECFDK

SEQ ID NO: 96281 - protein, 19 aa, Severe acute respiratory syndrome coronavirus 2
DKCSRIIPARARVECFDKF

SEQ ID NO: 96282 - protein, 19 aa, Severe acute respiratory syndrome coronavirus 2
KCSRIIPARARVECFDKFK

SEQ ID NO: 96283 - protein, 19 aa, Severe acute respiratory syndrome coronavirus 2
AWRKAVFISPYNSQNAVAS

SEQ ID NO: 96284 - protein, 19 aa, Severe acute respiratory syndrome coronavirus 2
GIPKDMTYRRLISMMGFKM

SEQ ID NO: 96285 - protein, 19 aa, Severe acute respiratory syndrome coronavirus 2
IPKDMTYRRLISMMGFKMN

SEQ ID NO: 96286 - protein, 19 aa, Severe acute respiratory syndrome coronavirus 2
PKDMTYRRLISMMGFKMNY

SEQ ID NO: 96287 - protein, 19 aa, Severe acute respiratory syndrome coronavirus 2
KDMTYRRLISMMGFKMNYQ

SEQ ID NO: 96288 - protein, 19 aa, Severe acute respiratory syndrome coronavirus 2
DMTYRRLISMMGFKMNYQV

SEQ ID NO: 96289 - protein, 19 aa, Severe acute respiratory syndrome coronavirus 2
MTYRRLISMMGFKMNYQVN

SEQ ID NO: 96290 - protein, 19 aa, Severe acute respiratory syndrome coronavirus 2
TYRRLISMMGFKMNYQVNG

SEQ ID NO: 96291 - protein, 19 aa, Severe acute respiratory syndrome coronavirus 2
YRRLISMMGFKMNYQVNGY

SEQ ID NO: 96292 - protein, 19 aa, Severe acute respiratory syndrome coronavirus 2
RRLISMMGFKMNYQVNGYP

SEQ ID NO: 96293 - protein, 19 aa, Severe acute respiratory syndrome coronavirus 2
RLISMMGFKMNYQVNGYPN

SEQ ID NO: 96294 - protein, 19 aa, Severe acute respiratory syndrome coronavirus 2
LISMMGFKMNYQVNGYPNM

SEQ ID NO: 96295 - protein, 19 aa, Severe acute respiratory syndrome coronavirus 2
ISMMGFKMNYQVNGYPNMF

SEQ ID NO: 96296 - protein, 19 aa, Severe acute respiratory syndrome coronavirus 2
SMMGFKMNYQVNGYPNMFI

SEQ ID NO: 96297 - protein, 19 aa, Severe acute respiratory syndrome coronavirus 2
MMGFKMNYQVNGYPNMFIT

SEQ ID NO: 96298 - protein, 19 aa, Severe acute respiratory syndrome coronavirus 2
MGFKMNYQVNGYPNMFITR

SEQ ID NO: 96299 - protein, 19 aa, Severe acute respiratory syndrome coronavirus 2
GFKMNYQVNGYPNMFITRE

SEQ ID NO: 96300 - protein, 19 aa, Severe acute respiratory syndrome coronavirus 2
FKMNYQVNGYPNMFITREE

SEQ ID NO: 96301 - protein, 19 aa, Severe acute respiratory syndrome coronavirus 2
KMNYQVNGYPNMFITREEA

SEQ ID NO: 96302 - protein, 19 aa, Severe acute respiratory syndrome coronavirus 2
MNYQVNGYPNMFITREEAI

SEQ ID NO: 96303 - protein, 19 aa, Severe acute respiratory syndrome coronavirus 2
HVRAWIGFDVEGCHATREA

SEQ ID NO: 96304 - protein, 19 aa, Severe acute respiratory syndrome coronavirus 2
VRAWIGFDVEGCHATREAV

SEQ ID NO: 96305 - protein, 19 aa, Severe acute respiratory syndrome coronavirus 2
RAWIGFDVEGCHATREAVG

SEQ ID NO: 96306 - protein, 19 aa, Severe acute respiratory syndrome coronavirus 2
GCHATREAVGTNLPLQLGF

SEQ ID NO: 96307 - protein, 19 aa, Severe acute respiratory syndrome coronavirus 2
CHATREAVGTNLPLQLGFS

SEQ ID NO: 96308 - protein, 19 aa, Severe acute respiratory syndrome coronavirus 2
SDRVVFVLWAHGFELTSMK

SEQ ID NO: 96309 - protein, 19 aa, Severe acute respiratory syndrome coronavirus 2
DRVVFVLWAHGFELTSMKY

SEQ ID NO: 96310 - protein, 19 aa, Severe acute respiratory syndrome coronavirus 2
RVVFVLWAHGFELTSMKYF

SEQ ID NO: 96311 - protein, 19 aa, Severe acute respiratory syndrome coronavirus 2
VVFVLWAHGFELTSMKYFV

SEQ ID NO: 96312 - protein, 19 aa, Severe acute respiratory syndrome coronavirus 2
VFVLWAHGFELTSMKYFVK

SEQ ID NO: 96313 - protein, 19 aa, Severe acute respiratory syndrome coronavirus 2
FVLWAHGFELTSMKYFVKI

SEQ ID NO: 96314 - protein, 19 aa, Severe acute respiratory syndrome coronavirus 2
VLWAHGFELTSMKYFVKIG

SEQ ID NO: 96315 - protein, 19 aa, Severe acute respiratory syndrome coronavirus 2
LWAHGFELTSMKYFVKIGP

SEQ ID NO: 96316 - protein, 19 aa, Severe acute respiratory syndrome coronavirus 2
WAHGFELTSMKYFVKIGPE

SEQ ID NO: 96317 - protein, 19 aa, Severe acute respiratory syndrome coronavirus 2
AHGFELTSMKYFVKIGPER

SEQ ID NO: 96318 - protein, 19 aa, Severe acute respiratory syndrome coronavirus 2
HGFELTSMKYFVKIGPERT

SEQ ID NO: 96319 - protein, 19 aa, Severe acute respiratory syndrome coronavirus 2
GFELTSMKYFVKIGPERTC

SEQ ID NO: 96320 - protein, 19 aa, Severe acute respiratory syndrome coronavirus 2
FELTSMKYFVKIGPERTCC

SEQ ID NO: 96321 - protein, 19 aa, Severe acute respiratory syndrome coronavirus 2
ELTSMKYFVKIGPERTCCL

SEQ ID NO: 96322 - protein, 19 aa, Severe acute respiratory syndrome coronavirus 2
LTSMKYFVKIGPERTCCLC

SEQ ID NO: 96323 - protein, 19 aa, Severe acute respiratory syndrome coronavirus 2
TSMKYFVKIGPERTCCLCD

SEQ ID NO: 96324 - protein, 19 aa, Severe acute respiratory syndrome coronavirus 2
RATCFSTASDTYACWHHSI

SEQ ID NO: 96325 - protein, 19 aa, Severe acute respiratory syndrome coronavirus 2
ATCFSTASDTYACWHHSIG

SEQ ID NO: 96326 - protein, 19 aa, Severe acute respiratory syndrome coronavirus 2
DKFPVLHDIGNPKAIKCVP

SEQ ID NO: 96327 - protein, 19 aa, Severe acute respiratory syndrome coronavirus 2
KFPVLHDIGNPKAIKCVPQ

SEQ ID NO: 96328 - protein, 19 aa, Severe acute respiratory syndrome coronavirus 2
GVCLFWNCNVDRYPANSIV

SEQ ID NO: 96329 - protein, 19 aa, Severe acute respiratory syndrome coronavirus 2
VCLFWNCNVDRYPANSIVC

SEQ ID NO: 96330 - protein, 19 aa, Severe acute respiratory syndrome coronavirus 2
CLFWNCNVDRYPANSIVCR

SEQ ID NO: 96331 - protein, 19 aa, Severe acute respiratory syndrome coronavirus 2
LFWNCNVDRYPANSIVCRF

SEQ ID NO: 96332 - protein, 19 aa, Severe acute respiratory syndrome coronavirus 2
FWNCNVDRYPANSIVCRFD

SEQ ID NO: 96333 - protein, 19 aa, Severe acute respiratory syndrome coronavirus 2
WNCNVDRYPANSIVCRFDT

SEQ ID NO: 96334 - protein, 19 aa, Severe acute respiratory syndrome coronavirus 2
NCNVDRYPANSIVCRFDTR

SEQ ID NO: 96335 - protein, 19 aa, Severe acute respiratory syndrome coronavirus 2
CNVDRYPANSIVCRFDTRV

SEQ ID NO: 96336 - protein, 19 aa, Severe acute respiratory syndrome coronavirus 2
NVDRYPANSIVCRFDTRVL

SEQ ID NO: 96337 - protein, 19 aa, Severe acute respiratory syndrome coronavirus 2
VDRYPANSIVCRFDTRVLS

SEQ ID NO: 96338 - protein, 19 aa, Severe acute respiratory syndrome coronavirus 2
DRYPANSIVCRFDTRVLSN

SEQ ID NO: 96339 - protein, 19 aa, Severe acute respiratory syndrome coronavirus 2
RYPANSIVCRFDTRVLSNL

SEQ ID NO: 96340 - protein, 19 aa, Severe acute respiratory syndrome coronavirus 2
YPANSIVCRFDTRVLSNLN

SEQ ID NO: 96341 - protein, 19 aa, Severe acute respiratory syndrome coronavirus 2
PANSIVCRFDTRVLSNLNL

SEQ ID NO: 96342 - protein, 19 aa, Severe acute respiratory syndrome coronavirus 2
DKSAFVNLKQLPFFYYSDS

SEQ ID NO: 96343 - protein, 19 aa, Severe acute respiratory syndrome coronavirus 2
KSAFVNLKQLPFFYYSDSP

SEQ ID NO: 96344 - protein, 19 aa, Severe acute respiratory syndrome coronavirus 2
SAFVNLKQLPFFYYSDSPC

SEQ ID NO: 96345 - protein, 19 aa, Severe acute respiratory syndrome coronavirus 2
AFVNLKQLPFFYYSDSPCE

SEQ ID NO: 96346 - protein, 19 aa, Severe acute respiratory syndrome coronavirus 2
FVNLKQLPFFYYSDSPCES

SEQ ID NO: 96347 - protein, 19 aa, Severe acute respiratory syndrome coronavirus 2
VNLKQLPFFYYSDSPCESH

SEQ ID NO: 96348 - protein, 19 aa, Severe acute respiratory syndrome coronavirus 2
NLKQLPFFYYSDSPCESHG

SEQ ID NO: 96349 - protein, 19 aa, Severe acute respiratory syndrome coronavirus 2
LKQLPFFYYSDSPCESHGK

SEQ ID NO: 96350 - protein, 19 aa, Severe acute respiratory syndrome coronavirus 2
VVSDIDYVPLKSATCITRC

SEQ ID NO: 96351 - protein, 19 aa, Severe acute respiratory syndrome coronavirus 2
VSDIDYVPLKSATCITRCN

SEQ ID NO: 96352 - protein, 19 aa, Severe acute respiratory syndrome coronavirus 2
SDIDYVPLKSATCITRCNL

SEQ ID NO: 96353 - protein, 19 aa, Severe acute respiratory syndrome coronavirus 2
DIDYVPLKSATCITRCNLG

SEQ ID NO: 96354 - protein, 19 aa, Severe acute respiratory syndrome coronavirus 2
IDYVPLKSATCITRCNLGG

SEQ ID NO: 96355 - protein, 19 aa, Severe acute respiratory syndrome coronavirus 2
ISAGFSLWVYKQFDTYNLW

SEQ ID NO: 96356 - protein, 19 aa, Severe acute respiratory syndrome coronavirus 2
SAGFSLWVYKQFDTYNLWN

SEQ ID NO: 96357 - protein, 19 aa, Severe acute respiratory syndrome coronavirus 2
AGFSLWVYKQFDTYNLWNT

SEQ ID NO: 96358 - protein, 19 aa, Severe acute respiratory syndrome coronavirus 2
GFSLWVYKQFDTYNLWNTF

SEQ ID NO: 96359 - protein, 19 aa, Severe acute respiratory syndrome coronavirus 2
LWVYKQFDTYNLWNTFTRL

SEQ ID NO: 96360 - protein, 19 aa, Severe acute respiratory syndrome coronavirus 2
WVYKQFDTYNLWNTFTRLQ

SEQ ID NO: 96361 - protein, 19 aa, Severe acute respiratory syndrome coronavirus 2
KTTLPVNVAFELWAKRNIK

SEQ ID NO: 96362 - protein, 19 aa, Severe acute respiratory syndrome coronavirus 2
TTLPVNVAFELWAKRNIKP

SEQ ID NO: 96363 - protein, 19 aa, Severe acute respiratory syndrome coronavirus 2
TLPVNVAFELWAKRNIKPV

SEQ ID NO: 96364 - protein, 19 aa, Severe acute respiratory syndrome coronavirus 2
LPVNVAFELWAKRNIKPVP

SEQ ID NO: 96365 - protein, 19 aa, Severe acute respiratory syndrome coronavirus 2
PVNVAFELWAKRNIKPVPE

SEQ ID NO: 96366 - protein, 19 aa, Severe acute respiratory syndrome coronavirus 2
IAANTVIWDYKRDAPAHIS

SEQ ID NO: 96367 - protein, 19 aa, Severe acute respiratory syndrome coronavirus 2
AANTVIWDYKRDAPAHIST

SEQ ID NO: 96368 - protein, 19 aa, Severe acute respiratory syndrome coronavirus 2
ANTVIWDYKRDAPAHISTI

SEQ ID NO: 96369 - protein, 19 aa, Severe acute respiratory syndrome coronavirus 2
NTVIWDYKRDAPAHISTIG

SEQ ID NO: 96370 - protein, 19 aa, Severe acute respiratory syndrome coronavirus 2
TVIWDYKRDAPAHISTIGV

SEQ ID NO: 96371 - protein, 19 aa, Severe acute respiratory syndrome coronavirus 2
VIWDYKRDAPAHISTIGVC

SEQ ID NO: 96372 - protein, 19 aa, Severe acute respiratory syndrome coronavirus 2
IWDYKRDAPAHISTIGVCS

SEQ ID NO: 96373 - protein, 19 aa, Severe acute respiratory syndrome coronavirus 2
WDYKRDAPAHISTIGVCSM

SEQ ID NO: 96374 - protein, 19 aa, Severe acute respiratory syndrome coronavirus 2
DYKRDAPAHISTIGVCSMT

SEQ ID NO: 96375 - protein, 19 aa, Severe acute respiratory syndrome coronavirus 2
YKRDAPAHISTIGVCSMTD

SEQ ID NO: 96376 - protein, 19 aa, Severe acute respiratory syndrome coronavirus 2
KRDAPAHISTIGVCSMTDI

SEQ ID NO: 96377 - protein, 19 aa, Severe acute respiratory syndrome coronavirus 2
RDAPAHISTIGVCSMTDIA

SEQ ID NO: 96378 - protein, 19 aa, Severe acute respiratory syndrome coronavirus 2
DAPAHISTIGVCSMTDIAK

SEQ ID NO: 96379 - protein, 19 aa, Severe acute respiratory syndrome coronavirus 2
APAHISTIGVCSMTDIAKK

SEQ ID NO: 96380 - protein, 19 aa, Severe acute respiratory syndrome coronavirus 2
PAHISTIGVCSMTDIAKKP

SEQ ID NO: 96381 - protein, 19 aa, Severe acute respiratory syndrome coronavirus 2
AHISTIGVCSMTDIAKKPT

SEQ ID NO: 96382 - protein, 19 aa, Severe acute respiratory syndrome coronavirus 2
HISTIGVCSMTDIAKKPTE

SEQ ID NO: 96383 - protein, 19 aa, Severe acute respiratory syndrome coronavirus 2
EGSVKGLQPSVGPKQASLN

SEQ ID NO: 96384 - protein, 19 aa, Severe acute respiratory syndrome coronavirus 2
GSVKGLQPSVGPKQASLNG

SEQ ID NO: 96385 - protein, 19 aa, Severe acute respiratory syndrome coronavirus 2
GLQPSVGPKQASLNGVTLI

SEQ ID NO: 96386 - protein, 19 aa, Severe acute respiratory syndrome coronavirus 2
LQPSVGPKQASLNGVTLIG

SEQ ID NO: 96387 - protein, 19 aa, Severe acute respiratory syndrome coronavirus 2
QPSVGPKQASLNGVTLIGE

SEQ ID NO: 96388 - protein, 19 aa, Severe acute respiratory syndrome coronavirus 2
PSVGPKQASLNGVTLIGEA

SEQ ID NO: 96389 - protein, 19 aa, Severe acute respiratory syndrome coronavirus 2
KTQFNYYKKVDGVVQQLPE

SEQ ID NO: 96390 - protein, 19 aa, Severe acute respiratory syndrome coronavirus 2
TQFNYYKKVDGVVQQLPET

SEQ ID NO: 96391 - protein, 19 aa, Severe acute respiratory syndrome coronavirus 2
QFNYYKKVDGVVQQLPETY

SEQ ID NO: 96392 - protein, 19 aa, Severe acute respiratory syndrome coronavirus 2
FNYYKKVDGVVQQLPETYF

SEQ ID NO: 96393 - protein, 19 aa, Severe acute respiratory syndrome coronavirus 2
NYYKKVDGVVQQLPETYFT

SEQ ID NO: 96394 - protein, 19 aa, Severe acute respiratory syndrome coronavirus 2
YYKKVDGVVQQLPETYFTQ

SEQ ID NO: 96395 - protein, 19 aa, Severe acute respiratory syndrome coronavirus 2
YKKVDGVVQQLPETYFTQS

SEQ ID NO: 96396 - protein, 19 aa, Severe acute respiratory syndrome coronavirus 2
KKVDGVVQQLPETYFTQSR

SEQ ID NO: 96397 - protein, 19 aa, Severe acute respiratory syndrome coronavirus 2
KVDGVVQQLPETYFTQSRN

SEQ ID NO: 96398 - protein, 19 aa, Severe acute respiratory syndrome coronavirus 2
VDGVVQQLPETYFTQSRNL

SEQ ID NO: 96399 - protein, 19 aa, Severe acute respiratory syndrome coronavirus 2
DGVVQQLPETYFTQSRNLQ

SEQ ID NO: 96400 - protein, 19 aa, Severe acute respiratory syndrome coronavirus 2
GVVQQLPETYFTQSRNLQE

SEQ ID NO: 96401 - protein, 19 aa, Severe acute respiratory syndrome coronavirus 2
VVQQLPETYFTQSRNLQEF

SEQ ID NO: 96402 - protein, 19 aa, Severe acute respiratory syndrome coronavirus 2
VQQLPETYFTQSRNLQEFK

SEQ ID NO: 96403 - protein, 19 aa, Severe acute respiratory syndrome coronavirus 2
QQLPETYFTQSRNLQEFKP

SEQ ID NO: 96404 - protein, 19 aa, Severe acute respiratory syndrome coronavirus 2
LPKGIMMNVAKYTQLCQYL

SEQ ID NO: 96405 - protein, 19 aa, Severe acute respiratory syndrome coronavirus 2
PKGIMMNVAKYTQLCQYLN

SEQ ID NO: 96406 - protein, 19 aa, Severe acute respiratory syndrome coronavirus 2
VAKYTQLCQYLNTLTLAVP

SEQ ID NO: 96407 - protein, 19 aa, Severe acute respiratory syndrome coronavirus 2
AKYTQLCQYLNTLTLAVPY

SEQ ID NO: 96408 - protein, 19 aa, Severe acute respiratory syndrome coronavirus 2
KYTQLCQYLNTLTLAVPYN

SEQ ID NO: 96409 - protein, 19 aa, Severe acute respiratory syndrome coronavirus 2
LTLAVPYNMRVIHFGAGSD

SEQ ID NO: 96410 - protein, 19 aa, Severe acute respiratory syndrome coronavirus 2
TLAVPYNMRVIHFGAGSDK

SEQ ID NO: 96411 - protein, 19 aa, Severe acute respiratory syndrome coronavirus 2
VAPGTAVLRQWLPTGTLLV

SEQ ID NO: 96412 - protein, 19 aa, Severe acute respiratory syndrome coronavirus 2
APGTAVLRQWLPTGTLLVD

SEQ ID NO: 96413 - protein, 19 aa, Severe acute respiratory syndrome coronavirus 2
PGTAVLRQWLPTGTLLVDS

SEQ ID NO: 96414 - protein, 19 aa, Severe acute respiratory syndrome coronavirus 2
GTAVLRQWLPTGTLLVDSD

SEQ ID NO: 96415 - protein, 19 aa, Severe acute respiratory syndrome coronavirus 2
TAVLRQWLPTGTLLVDSDL

SEQ ID NO: 96416 - protein, 19 aa, Severe acute respiratory syndrome coronavirus 2
AVLRQWLPTGTLLVDSDLN

SEQ ID NO: 96417 - protein, 19 aa, Severe acute respiratory syndrome coronavirus 2
VLRQWLPTGTLLVDSDLND

SEQ ID NO: 96418 - protein, 19 aa, Severe acute respiratory syndrome coronavirus 2
LRQWLPTGTLLVDSDLNDF

SEQ ID NO: 96419 - protein, 19 aa, Severe acute respiratory syndrome coronavirus 2
RQWLPTGTLLVDSDLNDFV

SEQ ID NO: 96420 - protein, 19 aa, Severe acute respiratory syndrome coronavirus 2
QWLPTGTLLVDSDLNDFVS

SEQ ID NO: 96421 - protein, 19 aa, Severe acute respiratory syndrome coronavirus 2
WLPTGTLLVDSDLNDFVSD

SEQ ID NO: 96422 - protein, 19 aa, Severe acute respiratory syndrome coronavirus 2
LPTGTLLVDSDLNDFVSDA

SEQ ID NO: 96423 - protein, 19 aa, Severe acute respiratory syndrome coronavirus 2
LGGSVAIKITEHSWNADLY

SEQ ID NO: 96424 - protein, 19 aa, Severe acute respiratory syndrome coronavirus 2
AIKITEHSWNADLYKLMGH

SEQ ID NO: 96425 - protein, 19 aa, Severe acute respiratory syndrome coronavirus 2
IKITEHSWNADLYKLMGHF

SEQ ID NO: 96426 - protein, 19 aa, Severe acute respiratory syndrome coronavirus 2
LSSYSLFDMSKFPLKLRGT

SEQ ID NO: 96427 - protein, 19 aa, Severe acute respiratory syndrome coronavirus 2
SSYSLFDMSKFPLKLRGTA

SEQ ID NO: 96428 - protein, 19 aa, Severe acute respiratory syndrome coronavirus 2
SYSLFDMSKFPLKLRGTAV

SEQ ID NO: 96429 - protein, 19 aa, Severe acute respiratory syndrome coronavirus 2
YSLFDMSKFPLKLRGTAVM

SEQ ID NO: 96430 - protein, 19 aa, Severe acute respiratory syndrome coronavirus 2
SLFDMSKFPLKLRGTAVMS

SEQ ID NO: 96431 - protein, 19 aa, Severe acute respiratory syndrome coronavirus 2
LFDMSKFPLKLRGTAVMSL

SEQ ID NO: 96432 - protein, 19 aa, Severe acute respiratory syndrome coronavirus 2
FDMSKFPLKLRGTAVMSLK

SEQ ID NO: 96433 - protein, 19 aa, Severe acute respiratory syndrome coronavirus 2
DMSKFPLKLRGTAVMSLKE

SEQ ID NO: 96434 - protein, 19 aa, Severe acute respiratory syndrome coronavirus 2
QINDMILSLLSKGRLIIRE

SEQ ID NO: 96435 - protein, 19 aa, Severe acute respiratory syndrome coronavirus 2
INDMILSLLSKGRLIIREN

SEQ ID NO: 96436 - protein, 19 aa, Severe acute respiratory syndrome coronavirus 2
NDMILSLLSKGRLIIRENN

SEQ ID NO: 96437 - protein, 19 aa, Severe acute respiratory syndrome coronavirus 2
DMILSLLSKGRLIIRENNR

SEQ ID NO: 96438 - protein, 20 aa, Severe acute respiratory syndrome coronavirus 2
DEDDNLIDSYFVVKRHTFSN

SEQ ID NO: 96439 - protein, 20 aa, Severe acute respiratory syndrome coronavirus 2
LIDSYFVVKRHTFSNYQHEE

SEQ ID NO: 96440 - protein, 20 aa, Severe acute respiratory syndrome coronavirus 2
KHDFFKFRIDGDMVPHISRQ

SEQ ID NO: 96441 - protein, 20 aa, Severe acute respiratory syndrome coronavirus 2
HDFFKFRIDGDMVPHISRQR

SEQ ID NO: 96442 - protein, 20 aa, Severe acute respiratory syndrome coronavirus 2
DFFKFRIDGDMVPHISRQRL

SEQ ID NO: 96443 - protein, 20 aa, Severe acute respiratory syndrome coronavirus 2
FFKFRIDGDMVPHISRQRLT

SEQ ID NO: 96444 - protein, 20 aa, Severe acute respiratory syndrome coronavirus 2
FKFRIDGDMVPHISRQRLTK

SEQ ID NO: 96445 - protein, 20 aa, Severe acute respiratory syndrome coronavirus 2
KFRIDGDMVPHISRQRLTKY

SEQ ID NO: 96446 - protein, 20 aa, Severe acute respiratory syndrome coronavirus 2
FRIDGDMVPHISRQRLTKYT

SEQ ID NO: 96447 - protein, 20 aa, Severe acute respiratory syndrome coronavirus 2
RIDGDMVPHISRQRLTKYTM

SEQ ID NO: 96448 - protein, 20 aa, Severe acute respiratory syndrome coronavirus 2
IDGDMVPHISRQRLTKYTMA

SEQ ID NO: 96449 - protein, 20 aa, Severe acute respiratory syndrome coronavirus 2
DGDMVPHISRQRLTKYTMAD

SEQ ID NO: 96450 - protein, 20 aa, Severe acute respiratory syndrome coronavirus 2
GDMVPHISRQRLTKYTMADL

SEQ ID NO: 96451 - protein, 20 aa, Severe acute respiratory syndrome coronavirus 2
VPHISRQRLTKYTMADLVYA

SEQ ID NO: 96452 - protein, 20 aa, Severe acute respiratory syndrome coronavirus 2
PHISRQRLTKYTMADLVYAL

SEQ ID NO: 96453 - protein, 20 aa, Severe acute respiratory syndrome coronavirus 2
HISRQRLTKYTMADLVYALR

SEQ ID NO: 96454 - protein, 20 aa, Severe acute respiratory syndrome coronavirus 2
ISRQRLTKYTMADLVYALRH

SEQ ID NO: 96455 - protein, 20 aa, Severe acute respiratory syndrome coronavirus 2
SRQRLTKYTMADLVYALRHF

SEQ ID NO: 96456 - protein, 20 aa, Severe acute respiratory syndrome coronavirus 2
RQRLTKYTMADLVYALRHFD

SEQ ID NO: 96457 - protein, 20 aa, Severe acute respiratory syndrome coronavirus 2
QRLTKYTMADLVYALRHFDE

SEQ ID NO: 96458 - protein, 20 aa, Severe acute respiratory syndrome coronavirus 2
RLTKYTMADLVYALRHFDEG

SEQ ID NO: 96459 - protein, 20 aa, Severe acute respiratory syndrome coronavirus 2
LTKYTMADLVYALRHFDEGN

SEQ ID NO: 96460 - protein, 20 aa, Severe acute respiratory syndrome coronavirus 2
TKYTMADLVYALRHFDEGNC

SEQ ID NO: 96461 - protein, 20 aa, Severe acute respiratory syndrome coronavirus 2
KYTMADLVYALRHFDEGNCD

SEQ ID NO: 96462 - protein, 20 aa, Severe acute respiratory syndrome coronavirus 2
VQFCDAMRNAGIVGVLTLDN

SEQ ID NO: 96463 - protein, 20 aa, Severe acute respiratory syndrome coronavirus 2
QFCDAMRNAGIVGVLTLDNQ

SEQ ID NO: 96464 - protein, 20 aa, Severe acute respiratory syndrome coronavirus 2
FCDAMRNAGIVGVLTLDNQD

SEQ ID NO: 96465 - protein, 20 aa, Severe acute respiratory syndrome coronavirus 2
CDAMRNAGIVGVLTLDNQDL

SEQ ID NO: 96466 - protein, 20 aa, Severe acute respiratory syndrome coronavirus 2
DAMRNAGIVGVLTLDNQDLN

SEQ ID NO: 96467 - protein, 20 aa, Severe acute respiratory syndrome coronavirus 2
AMRNAGIVGVLTLDNQDLNG

SEQ ID NO: 96468 - protein, 20 aa, Severe acute respiratory syndrome coronavirus 2
MRNAGIVGVLTLDNQDLNGN

SEQ ID NO: 96469 - protein, 20 aa, Severe acute respiratory syndrome coronavirus 2
RNAGIVGVLTLDNQDLNGNW

SEQ ID NO: 96470 - protein, 20 aa, Severe acute respiratory syndrome coronavirus 2
NAGIVGVLTLDNQDLNGNWY

SEQ ID NO: 96471 - protein, 20 aa, Severe acute respiratory syndrome coronavirus 2
AGIVGVLTLDNQDLNGNWYD

SEQ ID NO: 96472 - protein, 20 aa, Severe acute respiratory syndrome coronavirus 2
GIVGVLTLDNQDLNGNWYDF

SEQ ID NO: 96473 - protein, 20 aa, Severe acute respiratory syndrome coronavirus 2
IVGVLTLDNQDLNGNWYDFG

SEQ ID NO: 96474 - protein, 20 aa, Severe acute respiratory syndrome coronavirus 2
VGVLTLDNQDLNGNWYDFGD

SEQ ID NO: 96475 - protein, 20 aa, Severe acute respiratory syndrome coronavirus 2
GVLTLDNQDLNGNWYDFGDF

SEQ ID NO: 96476 - protein, 20 aa, Severe acute respiratory syndrome coronavirus 2
ESHVDTDLTKPYIKWDLLKY

SEQ ID NO: 96477 - protein, 20 aa, Severe acute respiratory syndrome coronavirus 2
SHVDTDLTKPYIKWDLLKYD

SEQ ID NO: 96478 - protein, 20 aa, Severe acute respiratory syndrome coronavirus 2
HVDTDLTKPYIKWDLLKYDF

SEQ ID NO: 96479 - protein, 20 aa, Severe acute respiratory syndrome coronavirus 2
VRKIFVDGVPFVVSTGYHFR

SEQ ID NO: 96480 - protein, 20 aa, Severe acute respiratory syndrome coronavirus 2
RKIFVDGVPFVVSTGYHFRE

SEQ ID NO: 96481 - protein, 20 aa, Severe acute respiratory syndrome coronavirus 2
KIFVDGVPFVVSTGYHFREL

SEQ ID NO: 96482 - protein, 20 aa, Severe acute respiratory syndrome coronavirus 2
IFVDGVPFVVSTGYHFRELG

SEQ ID NO: 96483 - protein, 20 aa, Severe acute respiratory syndrome coronavirus 2
FVDGVPFVVSTGYHFRELGV

SEQ ID NO: 96484 - protein, 20 aa, Severe acute respiratory syndrome coronavirus 2
VDGVPFVVSTGYHFRELGVV

SEQ ID NO: 96485 - protein, 20 aa, Severe acute respiratory syndrome coronavirus 2
DGVPFVVSTGYHFRELGVVH

SEQ ID NO: 96486 - protein, 20 aa, Severe acute respiratory syndrome coronavirus 2
GVPFVVSTGYHFRELGVVHN

SEQ ID NO: 96487 - protein, 20 aa, Severe acute respiratory syndrome coronavirus 2
DVNLHSSRLSFKELLVYAAD

SEQ ID NO: 96488 - protein, 20 aa, Severe acute respiratory syndrome coronavirus 2
VNLHSSRLSFKELLVYAADP

SEQ ID NO: 96489 - protein, 20 aa, Severe acute respiratory syndrome coronavirus 2
NLHSSRLSFKELLVYAADPA

SEQ ID NO: 96490 - protein, 20 aa, Severe acute respiratory syndrome coronavirus 2
AFQTVKPGNFNKDFYDFAVS

SEQ ID NO: 96491 - protein, 20 aa, Severe acute respiratory syndrome coronavirus 2
ISDYDYYRYNLPTMCDIRQL

SEQ ID NO: 96492 - protein, 20 aa, Severe acute respiratory syndrome coronavirus 2
SDYDYYRYNLPTMCDIRQLL

SEQ ID NO: 96493 - protein, 20 aa, Severe acute respiratory syndrome coronavirus 2
DYDYYRYNLPTMCDIRQLLF

SEQ ID NO: 96494 - protein, 20 aa, Severe acute respiratory syndrome coronavirus 2
QVIVNNLDKSAGFPFNKWGK

SEQ ID NO: 96495 - protein, 20 aa, Severe acute respiratory syndrome coronavirus 2
VIVNNLDKSAGFPFNKWGKA

SEQ ID NO: 96496 - protein, 20 aa, Severe acute respiratory syndrome coronavirus 2
IVNNLDKSAGFPFNKWGKAR

SEQ ID NO: 96497 - protein, 20 aa, Severe acute respiratory syndrome coronavirus 2
YTKRNVIPTITQMNLKYAIS

SEQ ID NO: 96498 - protein, 20 aa, Severe acute respiratory syndrome coronavirus 2
TKRNVIPTITQMNLKYAISA

SEQ ID NO: 96499 - protein, 20 aa, Severe acute respiratory syndrome coronavirus 2
KRNVIPTITQMNLKYAISAK

SEQ ID NO: 96500 - protein, 20 aa, Severe acute respiratory syndrome coronavirus 2
RNVIPTITQMNLKYAISAKN

SEQ ID NO: 96501 - protein, 20 aa, Severe acute respiratory syndrome coronavirus 2
NVIPTITQMNLKYAISAKNR

SEQ ID NO: 96502 - protein, 20 aa, Severe acute respiratory syndrome coronavirus 2
VIPTITQMNLKYAISAKNRA

SEQ ID NO: 96503 - protein, 20 aa, Severe acute respiratory syndrome coronavirus 2
IPTITQMNLKYAISAKNRAR

SEQ ID NO: 96504 - protein, 20 aa, Severe acute respiratory syndrome coronavirus 2
PTITQMNLKYAISAKNRART

SEQ ID NO: 96505 - protein, 20 aa, Severe acute respiratory syndrome coronavirus 2
TITQMNLKYAISAKNRARTV

SEQ ID NO: 96506 - protein, 20 aa, Severe acute respiratory syndrome coronavirus 2
ITQMNLKYAISAKNRARTVA

SEQ ID NO: 96507 - protein, 20 aa, Severe acute respiratory syndrome coronavirus 2
TQMNLKYAISAKNRARTVAG

SEQ ID NO: 96508 - protein, 20 aa, Severe acute respiratory syndrome coronavirus 2
QMNLKYAISAKNRARTVAGV

SEQ ID NO: 96509 - protein, 20 aa, Severe acute respiratory syndrome coronavirus 2
MNLKYAISAKNRARTVAGVS

SEQ ID NO: 96510 - protein, 20 aa, Severe acute respiratory syndrome coronavirus 2
NLKYAISAKNRARTVAGVSI

SEQ ID NO: 96511 - protein, 20 aa, Severe acute respiratory syndrome coronavirus 2
LKYAISAKNRARTVAGVSIC

SEQ ID NO: 96512 - protein, 20 aa, Severe acute respiratory syndrome coronavirus 2
KYAISAKNRARTVAGVSICS

SEQ ID NO: 96513 - protein, 20 aa, Severe acute respiratory syndrome coronavirus 2
YAISAKNRARTVAGVSICST

SEQ ID NO: 96514 - protein, 20 aa, Severe acute respiratory syndrome coronavirus 2
AISAKNRARTVAGVSICSTM

SEQ ID NO: 96515 - protein, 20 aa, Severe acute respiratory syndrome coronavirus 2
ISAKNRARTVAGVSICSTMT

SEQ ID NO: 96516 - protein, 20 aa, Severe acute respiratory syndrome coronavirus 2
SAKNRARTVAGVSICSTMTN

SEQ ID NO: 96517 - protein, 20 aa, Severe acute respiratory syndrome coronavirus 2
AKNRARTVAGVSICSTMTNR

SEQ ID NO: 96518 - protein, 20 aa, Severe acute respiratory syndrome coronavirus 2
KNRARTVAGVSICSTMTNRQ

SEQ ID NO: 96519 - protein, 20 aa, Severe acute respiratory syndrome coronavirus 2
NRARTVAGVSICSTMTNRQF

SEQ ID NO: 96520 - protein, 20 aa, Severe acute respiratory syndrome coronavirus 2
RARTVAGVSICSTMTNRQFH

SEQ ID NO: 96521 - protein, 20 aa, Severe acute respiratory syndrome coronavirus 2
ARTVAGVSICSTMTNRQFHQ

SEQ ID NO: 96522 - protein, 20 aa, Severe acute respiratory syndrome coronavirus 2
RTVAGVSICSTMTNRQFHQK

SEQ ID NO: 96523 - protein, 20 aa, Severe acute respiratory syndrome coronavirus 2
TVAGVSICSTMTNRQFHQKL

SEQ ID NO: 96524 - protein, 20 aa, Severe acute respiratory syndrome coronavirus 2
VAGVSICSTMTNRQFHQKLL

SEQ ID NO: 96525 - protein, 20 aa, Severe acute respiratory syndrome coronavirus 2
AGVSICSTMTNRQFHQKLLK

SEQ ID NO: 96526 - protein, 20 aa, Severe acute respiratory syndrome coronavirus 2
GVSICSTMTNRQFHQKLLKS

SEQ ID NO: 96527 - protein, 20 aa, Severe acute respiratory syndrome coronavirus 2
VSICSTMTNRQFHQKLLKSI

SEQ ID NO: 96528 - protein, 20 aa, Severe acute respiratory syndrome coronavirus 2
SICSTMTNRQFHQKLLKSIA

SEQ ID NO: 96529 - protein, 20 aa, Severe acute respiratory syndrome coronavirus 2
ICSTMTNRQFHQKLLKSIAA

SEQ ID NO: 96530 - protein, 20 aa, Severe acute respiratory syndrome coronavirus 2
CSTMTNRQFHQKLLKSIAAT

SEQ ID NO: 96531 - protein, 20 aa, Severe acute respiratory syndrome coronavirus 2
STMTNRQFHQKLLKSIAATR

SEQ ID NO: 96532 - protein, 20 aa, Severe acute respiratory syndrome coronavirus 2
TMTNRQFHQKLLKSIAATRG

SEQ ID NO: 96533 - protein, 20 aa, Severe acute respiratory syndrome coronavirus 2
MTNRQFHQKLLKSIAATRGA

SEQ ID NO: 96534 - protein, 20 aa, Severe acute respiratory syndrome coronavirus 2
TNRQFHQKLLKSIAATRGAT

SEQ ID NO: 96535 - protein, 20 aa, Severe acute respiratory syndrome coronavirus 2
CGGSLYVKPGGTSSGDATTA

SEQ ID NO: 96536 - protein, 20 aa, Severe acute respiratory syndrome coronavirus 2
GGSLYVKPGGTSSGDATTAY

SEQ ID NO: 96537 - protein, 20 aa, Severe acute respiratory syndrome coronavirus 2
GSLYVKPGGTSSGDATTAYA

SEQ ID NO: 96538 - protein, 20 aa, Severe acute respiratory syndrome coronavirus 2
SLYVKPGGTSSGDATTAYAN

SEQ ID NO: 96539 - protein, 20 aa, Severe acute respiratory syndrome coronavirus 2
LYVKPGGTSSGDATTAYANS

SEQ ID NO: 96540 - protein, 20 aa, Severe acute respiratory syndrome coronavirus 2
YVKPGGTSSGDATTAYANSV

SEQ ID NO: 96541 - protein, 20 aa, Severe acute respiratory syndrome coronavirus 2
VKPGGTSSGDATTAYANSVF

SEQ ID NO: 96542 - protein, 20 aa, Severe acute respiratory syndrome coronavirus 2
KPGGTSSGDATTAYANSVFN

SEQ ID NO: 96543 - protein, 20 aa, Severe acute respiratory syndrome coronavirus 2
PGGTSSGDATTAYANSVFNI

SEQ ID NO: 96544 - protein, 20 aa, Severe acute respiratory syndrome coronavirus 2
GGTSSGDATTAYANSVFNIC

SEQ ID NO: 96545 - protein, 20 aa, Severe acute respiratory syndrome coronavirus 2
GTSSGDATTAYANSVFNICQ

SEQ ID NO: 96546 - protein, 20 aa, Severe acute respiratory syndrome coronavirus 2
TSSGDATTAYANSVFNICQA

SEQ ID NO: 96547 - protein, 20 aa, Severe acute respiratory syndrome coronavirus 2
SSGDATTAYANSVFNICQAV

SEQ ID NO: 96548 - protein, 20 aa, Severe acute respiratory syndrome coronavirus 2
SGDATTAYANSVFNICQAVT

SEQ ID NO: 96549 - protein, 20 aa, Severe acute respiratory syndrome coronavirus 2
GDATTAYANSVFNICQAVTA

SEQ ID NO: 96550 - protein, 20 aa, Severe acute respiratory syndrome coronavirus 2
DATTAYANSVFNICQAVTAN

SEQ ID NO: 96551 - protein, 20 aa, Severe acute respiratory syndrome coronavirus 2
ATTAYANSVFNICQAVTANV

SEQ ID NO: 96552 - protein, 20 aa, Severe acute respiratory syndrome coronavirus 2
TTAYANSVFNICQAVTANVN

SEQ ID NO: 96553 - protein, 20 aa, Severe acute respiratory syndrome coronavirus 2
TAYANSVFNICQAVTANVNA

SEQ ID NO: 96554 - protein, 20 aa, Severe acute respiratory syndrome coronavirus 2
AYANSVFNICQAVTANVNAL

SEQ ID NO: 96555 - protein, 20 aa, Severe acute respiratory syndrome coronavirus 2
YANSVFNICQAVTANVNALL

SEQ ID NO: 96556 - protein, 20 aa, Severe acute respiratory syndrome coronavirus 2
ANSVFNICQAVTANVNALLS

SEQ ID NO: 96557 - protein, 20 aa, Severe acute respiratory syndrome coronavirus 2
NSVFNICQAVTANVNALLST

SEQ ID NO: 96558 - protein, 20 aa, Severe acute respiratory syndrome coronavirus 2
SVFNICQAVTANVNALLSTD

SEQ ID NO: 96559 - protein, 20 aa, Severe acute respiratory syndrome coronavirus 2
VFNICQAVTANVNALLSTDG

SEQ ID NO: 96560 - protein, 20 aa, Severe acute respiratory syndrome coronavirus 2
FNICQAVTANVNALLSTDGN

SEQ ID NO: 96561 - protein, 20 aa, Severe acute respiratory syndrome coronavirus 2
NICQAVTANVNALLSTDGNK

SEQ ID NO: 96562 - protein, 20 aa, Severe acute respiratory syndrome coronavirus 2
ICQAVTANVNALLSTDGNKI

SEQ ID NO: 96563 - protein, 20 aa, Severe acute respiratory syndrome coronavirus 2
CQAVTANVNALLSTDGNKIA

SEQ ID NO: 96564 - protein, 20 aa, Severe acute respiratory syndrome coronavirus 2
QAVTANVNALLSTDGNKIAD

SEQ ID NO: 96565 - protein, 20 aa, Severe acute respiratory syndrome coronavirus 2
AVTANVNALLSTDGNKIADK

SEQ ID NO: 96566 - protein, 20 aa, Severe acute respiratory syndrome coronavirus 2
VTANVNALLSTDGNKIADKY

SEQ ID NO: 96567 - protein, 20 aa, Severe acute respiratory syndrome coronavirus 2
TANVNALLSTDGNKIADKYV

SEQ ID NO: 96568 - protein, 20 aa, Severe acute respiratory syndrome coronavirus 2
ANVNALLSTDGNKIADKYVR

SEQ ID NO: 96569 - protein, 20 aa, Severe acute respiratory syndrome coronavirus 2
NVNALLSTDGNKIADKYVRN

SEQ ID NO: 96570 - protein, 20 aa, Severe acute respiratory syndrome coronavirus 2
VNALLSTDGNKIADKYVRNL

SEQ ID NO: 96571 - protein, 20 aa, Severe acute respiratory syndrome coronavirus 2
NALLSTDGNKIADKYVRNLQ

SEQ ID NO: 96572 - protein, 20 aa, Severe acute respiratory syndrome coronavirus 2
ALLSTDGNKIADKYVRNLQH

SEQ ID NO: 96573 - protein, 20 aa, Severe acute respiratory syndrome coronavirus 2
LLSTDGNKIADKYVRNLQHR

SEQ ID NO: 96574 - protein, 20 aa, Severe acute respiratory syndrome coronavirus 2
LSTDGNKIADKYVRNLQHRL

SEQ ID NO: 96575 - protein, 20 aa, Severe acute respiratory syndrome coronavirus 2
STDGNKIADKYVRNLQHRLY

SEQ ID NO: 96576 - protein, 20 aa, Severe acute respiratory syndrome coronavirus 2
TDGNKIADKYVRNLQHRLYE

SEQ ID NO: 96577 - protein, 20 aa, Severe acute respiratory syndrome coronavirus 2
DGNKIADKYVRNLQHRLYEC

SEQ ID NO: 96578 - protein, 20 aa, Severe acute respiratory syndrome coronavirus 2
GNKIADKYVRNLQHRLYECL

SEQ ID NO: 96579 - protein, 20 aa, Severe acute respiratory syndrome coronavirus 2
NKIADKYVRNLQHRLYECLY

SEQ ID NO: 96580 - protein, 20 aa, Severe acute respiratory syndrome coronavirus 2
KIADKYVRNLQHRLYECLYR

SEQ ID NO: 96581 - protein, 20 aa, Severe acute respiratory syndrome coronavirus 2
FYAYLRKHFSMMILSDDAVV

SEQ ID NO: 96582 - protein, 20 aa, Severe acute respiratory syndrome coronavirus 2
YAYLRKHFSMMILSDDAVVC

SEQ ID NO: 96583 - protein, 20 aa, Severe acute respiratory syndrome coronavirus 2
AYLRKHFSMMILSDDAVVCF

SEQ ID NO: 96584 - protein, 20 aa, Severe acute respiratory syndrome coronavirus 2
LVASIKNFKSVLYYQNNVFM

SEQ ID NO: 96585 - protein, 20 aa, Severe acute respiratory syndrome coronavirus 2
VASIKNFKSVLYYQNNVFMS

SEQ ID NO: 96586 - protein, 20 aa, Severe acute respiratory syndrome coronavirus 2
ASIKNFKSVLYYQNNVFMSE

SEQ ID NO: 96587 - protein, 20 aa, Severe acute respiratory syndrome coronavirus 2
SIKNFKSVLYYQNNVFMSEA

SEQ ID NO: 96588 - protein, 20 aa, Severe acute respiratory syndrome coronavirus 2
IKNFKSVLYYQNNVFMSEAK

SEQ ID NO: 96589 - protein, 20 aa, Severe acute respiratory syndrome coronavirus 2
KNFKSVLYYQNNVFMSEAKC

SEQ ID NO: 96590 - protein, 20 aa, Severe acute respiratory syndrome coronavirus 2
NFKSVLYYQNNVFMSEAKCW

SEQ ID NO: 96591 - protein, 20 aa, Severe acute respiratory syndrome coronavirus 2
FKSVLYYQNNVFMSEAKCWT

SEQ ID NO: 96592 - protein, 20 aa, Severe acute respiratory syndrome coronavirus 2
KSVLYYQNNVFMSEAKCWTE

SEQ ID NO: 96593 - protein, 20 aa, Severe acute respiratory syndrome coronavirus 2
SVLYYQNNVFMSEAKCWTET

SEQ ID NO: 96594 - protein, 20 aa, Severe acute respiratory syndrome coronavirus 2
VLYYQNNVFMSEAKCWTETD

SEQ ID NO: 96595 - protein, 20 aa, Severe acute respiratory syndrome coronavirus 2
LYYQNNVFMSEAKCWTETDL

SEQ ID NO: 96596 - protein, 20 aa, Severe acute respiratory syndrome coronavirus 2
PSRILGAGCFVDDIVKTDGT

SEQ ID NO: 96597 - protein, 20 aa, Severe acute respiratory syndrome coronavirus 2
SRILGAGCFVDDIVKTDGTL

SEQ ID NO: 96598 - protein, 20 aa, Severe acute respiratory syndrome coronavirus 2
RILGAGCFVDDIVKTDGTLM

SEQ ID NO: 96599 - protein, 20 aa, Severe acute respiratory syndrome coronavirus 2
ILGAGCFVDDIVKTDGTLMI

SEQ ID NO: 96600 - protein, 20 aa, Severe acute respiratory syndrome coronavirus 2
LGAGCFVDDIVKTDGTLMIE

SEQ ID NO: 96601 - protein, 20 aa, Severe acute respiratory syndrome coronavirus 2
GAGCFVDDIVKTDGTLMIER

SEQ ID NO: 96602 - protein, 20 aa, Severe acute respiratory syndrome coronavirus 2
AGCFVDDIVKTDGTLMIERF

SEQ ID NO: 96603 - protein, 20 aa, Severe acute respiratory syndrome coronavirus 2
GCFVDDIVKTDGTLMIERFV

SEQ ID NO: 96604 - protein, 20 aa, Severe acute respiratory syndrome coronavirus 2
CFVDDIVKTDGTLMIERFVS

SEQ ID NO: 96605 - protein, 20 aa, Severe acute respiratory syndrome coronavirus 2
FVDDIVKTDGTLMIERFVSL

SEQ ID NO: 96606 - protein, 20 aa, Severe acute respiratory syndrome coronavirus 2
VDDIVKTDGTLMIERFVSLA

SEQ ID NO: 96607 - protein, 20 aa, Severe acute respiratory syndrome coronavirus 2
DDIVKTDGTLMIERFVSLAI

SEQ ID NO: 96608 - protein, 20 aa, Severe acute respiratory syndrome coronavirus 2
DIVKTDGTLMIERFVSLAID

SEQ ID NO: 96609 - protein, 20 aa, Severe acute respiratory syndrome coronavirus 2
IVKTDGTLMIERFVSLAIDA

SEQ ID NO: 96610 - protein, 20 aa, Severe acute respiratory syndrome coronavirus 2
VKTDGTLMIERFVSLAIDAY

SEQ ID NO: 96611 - protein, 20 aa, Severe acute respiratory syndrome coronavirus 2
KTDGTLMIERFVSLAIDAYP

SEQ ID NO: 96612 - protein, 20 aa, Severe acute respiratory syndrome coronavirus 2
ISFPLCANGQVFGLYKNTCV

SEQ ID NO: 96613 - protein, 20 aa, Severe acute respiratory syndrome coronavirus 2
SFPLCANGQVFGLYKNTCVG

SEQ ID NO: 96614 - protein, 20 aa, Severe acute respiratory syndrome coronavirus 2
VTDFNAIATCDWTNAGDYIL

SEQ ID NO: 96615 - protein, 20 aa, Severe acute respiratory syndrome coronavirus 2
TDFNAIATCDWTNAGDYILA

SEQ ID NO: 96616 - protein, 20 aa, Severe acute respiratory syndrome coronavirus 2
DFNAIATCDWTNAGDYILAN

SEQ ID NO: 96617 - protein, 20 aa, Severe acute respiratory syndrome coronavirus 2
FNAIATCDWTNAGDYILANT

SEQ ID NO: 96618 - protein, 20 aa, Severe acute respiratory syndrome coronavirus 2
NAIATCDWTNAGDYILANTC

SEQ ID NO: 96619 - protein, 20 aa, Severe acute respiratory syndrome coronavirus 2
EETFKLSYGIATVREVLSDR

SEQ ID NO: 96620 - protein, 20 aa, Severe acute respiratory syndrome coronavirus 2
ETFKLSYGIATVREVLSDRE

SEQ ID NO: 96621 - protein, 20 aa, Severe acute respiratory syndrome coronavirus 2
TFKLSYGIATVREVLSDREL

SEQ ID NO: 96622 - protein, 20 aa, Severe acute respiratory syndrome coronavirus 2
RPPLNRNYVFTGYRVTKNSK

SEQ ID NO: 96623 - protein, 20 aa, Severe acute respiratory syndrome coronavirus 2
VYTACSHAAVDALCEKALKY

SEQ ID NO: 96624 - protein, 20 aa, Severe acute respiratory syndrome coronavirus 2
YTACSHAAVDALCEKALKYL

SEQ ID NO: 96625 - protein, 20 aa, Severe acute respiratory syndrome coronavirus 2
TACSHAAVDALCEKALKYLP

SEQ ID NO: 96626 - protein, 20 aa, Severe acute respiratory syndrome coronavirus 2
HAAVDALCEKALKYLPIDKC

SEQ ID NO: 96627 - protein, 20 aa, Severe acute respiratory syndrome coronavirus 2
AAVDALCEKALKYLPIDKCS

SEQ ID NO: 96628 - protein, 20 aa, Severe acute respiratory syndrome coronavirus 2
AVDALCEKALKYLPIDKCSR

SEQ ID NO: 96629 - protein, 20 aa, Severe acute respiratory syndrome coronavirus 2
VDALCEKALKYLPIDKCSRI

SEQ ID NO: 96630 - protein, 20 aa, Severe acute respiratory syndrome coronavirus 2
DALCEKALKYLPIDKCSRII

SEQ ID NO: 96631 - protein, 20 aa, Severe acute respiratory syndrome coronavirus 2
ALCEKALKYLPIDKCSRIIP

SEQ ID NO: 96632 - protein, 20 aa, Severe acute respiratory syndrome coronavirus 2
LCEKALKYLPIDKCSRIIPA

SEQ ID NO: 96633 - protein, 20 aa, Severe acute respiratory syndrome coronavirus 2
CEKALKYLPIDKCSRIIPAR

SEQ ID NO: 96634 - protein, 20 aa, Severe acute respiratory syndrome coronavirus 2
EKALKYLPIDKCSRIIPARA

SEQ ID NO: 96635 - protein, 20 aa, Severe acute respiratory syndrome coronavirus 2
KALKYLPIDKCSRIIPARAR

SEQ ID NO: 96636 - protein, 20 aa, Severe acute respiratory syndrome coronavirus 2
ALKYLPIDKCSRIIPARARV

SEQ ID NO: 96637 - protein, 20 aa, Severe acute respiratory syndrome coronavirus 2
LKYLPIDKCSRIIPARARVE

SEQ ID NO: 96638 - protein, 20 aa, Severe acute respiratory syndrome coronavirus 2
KYLPIDKCSRIIPARARVEC

SEQ ID NO: 96639 - protein, 20 aa, Severe acute respiratory syndrome coronavirus 2
YLPIDKCSRIIPARARVECF

SEQ ID NO: 96640 - protein, 20 aa, Severe acute respiratory syndrome coronavirus 2
LPIDKCSRIIPARARVECFD

SEQ ID NO: 96641 - protein, 20 aa, Severe acute respiratory syndrome coronavirus 2
PIDKCSRIIPARARVECFDK

SEQ ID NO: 96642 - protein, 20 aa, Severe acute respiratory syndrome coronavirus 2
IDKCSRIIPARARVECFDKF

SEQ ID NO: 96643 - protein, 20 aa, Severe acute respiratory syndrome coronavirus 2
DKCSRIIPARARVECFDKFK

SEQ ID NO: 96644 - protein, 20 aa, Severe acute respiratory syndrome coronavirus 2
GIPKDMTYRRLISMMGFKMN

SEQ ID NO: 96645 - protein, 20 aa, Severe acute respiratory syndrome coronavirus 2
IPKDMTYRRLISMMGFKMNY

SEQ ID NO: 96646 - protein, 20 aa, Severe acute respiratory syndrome coronavirus 2
PKDMTYRRLISMMGFKMNYQ

SEQ ID NO: 96647 - protein, 20 aa, Severe acute respiratory syndrome coronavirus 2
KDMTYRRLISMMGFKMNYQV

SEQ ID NO: 96648 - protein, 20 aa, Severe acute respiratory syndrome coronavirus 2
DMTYRRLISMMGFKMNYQVN

SEQ ID NO: 96649 - protein, 20 aa, Severe acute respiratory syndrome coronavirus 2
MTYRRLISMMGFKMNYQVNG

SEQ ID NO: 96650 - protein, 20 aa, Severe acute respiratory syndrome coronavirus 2
TYRRLISMMGFKMNYQVNGY

SEQ ID NO: 96651 - protein, 20 aa, Severe acute respiratory syndrome coronavirus 2
YRRLISMMGFKMNYQVNGYP

SEQ ID NO: 96652 - protein, 20 aa, Severe acute respiratory syndrome coronavirus 2
RRLISMMGFKMNYQVNGYPN

SEQ ID NO: 96653 - protein, 20 aa, Severe acute respiratory syndrome coronavirus 2
RLISMMGFKMNYQVNGYPNM

SEQ ID NO: 96654 - protein, 20 aa, Severe acute respiratory syndrome coronavirus 2
LISMMGFKMNYQVNGYPNMF

SEQ ID NO: 96655 - protein, 20 aa, Severe acute respiratory syndrome coronavirus 2
ISMMGFKMNYQVNGYPNMFI

SEQ ID NO: 96656 - protein, 20 aa, Severe acute respiratory syndrome coronavirus 2
SMMGFKMNYQVNGYPNMFIT

SEQ ID NO: 96657 - protein, 20 aa, Severe acute respiratory syndrome coronavirus 2
MMGFKMNYQVNGYPNMFITR

SEQ ID NO: 96658 - protein, 20 aa, Severe acute respiratory syndrome coronavirus 2
MGFKMNYQVNGYPNMFITRE

SEQ ID NO: 96659 - protein, 20 aa, Severe acute respiratory syndrome coronavirus 2
GFKMNYQVNGYPNMFITREE

SEQ ID NO: 96660 - protein, 20 aa, Severe acute respiratory syndrome coronavirus 2
FKMNYQVNGYPNMFITREEA

SEQ ID NO: 96661 - protein, 20 aa, Severe acute respiratory syndrome coronavirus 2
KMNYQVNGYPNMFITREEAI

SEQ ID NO: 96662 - protein, 20 aa, Severe acute respiratory syndrome coronavirus 2
HVRAWIGFDVEGCHATREAV

SEQ ID NO: 96663 - protein, 20 aa, Severe acute respiratory syndrome coronavirus 2
VRAWIGFDVEGCHATREAVG

SEQ ID NO: 96664 - protein, 20 aa, Severe acute respiratory syndrome coronavirus 2
RAWIGFDVEGCHATREAVGT

SEQ ID NO: 96665 - protein, 20 aa, Severe acute respiratory syndrome coronavirus 2
DVEGCHATREAVGTNLPLQL

SEQ ID NO: 96666 - protein, 20 aa, Severe acute respiratory syndrome coronavirus 2
VEGCHATREAVGTNLPLQLG

SEQ ID NO: 96667 - protein, 20 aa, Severe acute respiratory syndrome coronavirus 2
EGCHATREAVGTNLPLQLGF

SEQ ID NO: 96668 - protein, 20 aa, Severe acute respiratory syndrome coronavirus 2
GCHATREAVGTNLPLQLGFS

SEQ ID NO: 96669 - protein, 20 aa, Severe acute respiratory syndrome coronavirus 2
SDRVVFVLWAHGFELTSMKY

SEQ ID NO: 96670 - protein, 20 aa, Severe acute respiratory syndrome coronavirus 2
DRVVFVLWAHGFELTSMKYF

SEQ ID NO: 96671 - protein, 20 aa, Severe acute respiratory syndrome coronavirus 2
RVVFVLWAHGFELTSMKYFV

SEQ ID NO: 96672 - protein, 20 aa, Severe acute respiratory syndrome coronavirus 2
VVFVLWAHGFELTSMKYFVK

SEQ ID NO: 96673 - protein, 20 aa, Severe acute respiratory syndrome coronavirus 2
VFVLWAHGFELTSMKYFVKI

SEQ ID NO: 96674 - protein, 20 aa, Severe acute respiratory syndrome coronavirus 2
FVLWAHGFELTSMKYFVKIG

SEQ ID NO: 96675 - protein, 20 aa, Severe acute respiratory syndrome coronavirus 2
VLWAHGFELTSMKYFVKIGP

SEQ ID NO: 96676 - protein, 20 aa, Severe acute respiratory syndrome coronavirus 2
LWAHGFELTSMKYFVKIGPE

SEQ ID NO: 96677 - protein, 20 aa, Severe acute respiratory syndrome coronavirus 2
WAHGFELTSMKYFVKIGPER

SEQ ID NO: 96678 - protein, 20 aa, Severe acute respiratory syndrome coronavirus 2
AHGFELTSMKYFVKIGPERT

SEQ ID NO: 96679 - protein, 20 aa, Severe acute respiratory syndrome coronavirus 2
HGFELTSMKYFVKIGPERTC

SEQ ID NO: 96680 - protein, 20 aa, Severe acute respiratory syndrome coronavirus 2
GFELTSMKYFVKIGPERTCC

SEQ ID NO: 96681 - protein, 20 aa, Severe acute respiratory syndrome coronavirus 2
FELTSMKYFVKIGPERTCCL

SEQ ID NO: 96682 - protein, 20 aa, Severe acute respiratory syndrome coronavirus 2
ELTSMKYFVKIGPERTCCLC

SEQ ID NO: 96683 - protein, 20 aa, Severe acute respiratory syndrome coronavirus 2
LTSMKYFVKIGPERTCCLCD

SEQ ID NO: 96684 - protein, 20 aa, Severe acute respiratory syndrome coronavirus 2
RATCFSTASDTYACWHHSIG

SEQ ID NO: 96685 - protein, 20 aa, Severe acute respiratory syndrome coronavirus 2
DKFPVLHDIGNPKAIKCVPQ

SEQ ID NO: 96686 - protein, 20 aa, Severe acute respiratory syndrome coronavirus 2
KFPVLHDIGNPKAIKCVPQA

SEQ ID NO: 96687 - protein, 20 aa, Severe acute respiratory syndrome coronavirus 2
FPVLHDIGNPKAIKCVPQAD

SEQ ID NO: 96688 - protein, 20 aa, Severe acute respiratory syndrome coronavirus 2
GVCLFWNCNVDRYPANSIVC

SEQ ID NO: 96689 - protein, 20 aa, Severe acute respiratory syndrome coronavirus 2
VCLFWNCNVDRYPANSIVCR

SEQ ID NO: 96690 - protein, 20 aa, Severe acute respiratory syndrome coronavirus 2
CLFWNCNVDRYPANSIVCRF

SEQ ID NO: 96691 - protein, 20 aa, Severe acute respiratory syndrome coronavirus 2
LFWNCNVDRYPANSIVCRFD

SEQ ID NO: 96692 - protein, 20 aa, Severe acute respiratory syndrome coronavirus 2
FWNCNVDRYPANSIVCRFDT

SEQ ID NO: 96693 - protein, 20 aa, Severe acute respiratory syndrome coronavirus 2
WNCNVDRYPANSIVCRFDTR

SEQ ID NO: 96694 - protein, 20 aa, Severe acute respiratory syndrome coronavirus 2
NCNVDRYPANSIVCRFDTRV

SEQ ID NO: 96695 - protein, 20 aa, Severe acute respiratory syndrome coronavirus 2
CNVDRYPANSIVCRFDTRVL

SEQ ID NO: 96696 - protein, 20 aa, Severe acute respiratory syndrome coronavirus 2
NVDRYPANSIVCRFDTRVLS

SEQ ID NO: 96697 - protein, 20 aa, Severe acute respiratory syndrome coronavirus 2
VDRYPANSIVCRFDTRVLSN

SEQ ID NO: 96698 - protein, 20 aa, Severe acute respiratory syndrome coronavirus 2
DRYPANSIVCRFDTRVLSNL

SEQ ID NO: 96699 - protein, 20 aa, Severe acute respiratory syndrome coronavirus 2
RYPANSIVCRFDTRVLSNLN

SEQ ID NO: 96700 - protein, 20 aa, Severe acute respiratory syndrome coronavirus 2
YPANSIVCRFDTRVLSNLNL

SEQ ID NO: 96701 - protein, 20 aa, Severe acute respiratory syndrome coronavirus 2
DKSAFVNLKQLPFFYYSDSP

SEQ ID NO: 96702 - protein, 20 aa, Severe acute respiratory syndrome coronavirus 2
KSAFVNLKQLPFFYYSDSPC

SEQ ID NO: 96703 - protein, 20 aa, Severe acute respiratory syndrome coronavirus 2
SAFVNLKQLPFFYYSDSPCE

SEQ ID NO: 96704 - protein, 20 aa, Severe acute respiratory syndrome coronavirus 2
AFVNLKQLPFFYYSDSPCES

SEQ ID NO: 96705 - protein, 20 aa, Severe acute respiratory syndrome coronavirus 2
FVNLKQLPFFYYSDSPCESH

SEQ ID NO: 96706 - protein, 20 aa, Severe acute respiratory syndrome coronavirus 2
VNLKQLPFFYYSDSPCESHG

SEQ ID NO: 96707 - protein, 20 aa, Severe acute respiratory syndrome coronavirus 2
NLKQLPFFYYSDSPCESHGK

SEQ ID NO: 96708 - protein, 20 aa, Severe acute respiratory syndrome coronavirus 2
VVSDIDYVPLKSATCITRCN

SEQ ID NO: 96709 - protein, 20 aa, Severe acute respiratory syndrome coronavirus 2
VSDIDYVPLKSATCITRCNL

SEQ ID NO: 96710 - protein, 20 aa, Severe acute respiratory syndrome coronavirus 2
SDIDYVPLKSATCITRCNLG

SEQ ID NO: 96711 - protein, 20 aa, Severe acute respiratory syndrome coronavirus 2
DIDYVPLKSATCITRCNLGG

SEQ ID NO: 96712 - protein, 20 aa, Severe acute respiratory syndrome coronavirus 2
ISAGFSLWVYKQFDTYNLWN

SEQ ID NO: 96713 - protein, 20 aa, Severe acute respiratory syndrome coronavirus 2
SAGFSLWVYKQFDTYNLWNT

SEQ ID NO: 96714 - protein, 20 aa, Severe acute respiratory syndrome coronavirus 2
AGFSLWVYKQFDTYNLWNTF

SEQ ID NO: 96715 - protein, 20 aa, Severe acute respiratory syndrome coronavirus 2
LWVYKQFDTYNLWNTFTRLQ

SEQ ID NO: 96716 - protein, 20 aa, Severe acute respiratory syndrome coronavirus 2
KTTLPVNVAFELWAKRNIKP

SEQ ID NO: 96717 - protein, 20 aa, Severe acute respiratory syndrome coronavirus 2
TTLPVNVAFELWAKRNIKPV

SEQ ID NO: 96718 - protein, 20 aa, Severe acute respiratory syndrome coronavirus 2
TLPVNVAFELWAKRNIKPVP

SEQ ID NO: 96719 - protein, 20 aa, Severe acute respiratory syndrome coronavirus 2
LPVNVAFELWAKRNIKPVPE

SEQ ID NO: 96720 - protein, 20 aa, Severe acute respiratory syndrome coronavirus 2
IAANTVIWDYKRDAPAHIST

SEQ ID NO: 96721 - protein, 20 aa, Severe acute respiratory syndrome coronavirus 2
AANTVIWDYKRDAPAHISTI

SEQ ID NO: 96722 - protein, 20 aa, Severe acute respiratory syndrome coronavirus 2
ANTVIWDYKRDAPAHISTIG

SEQ ID NO: 96723 - protein, 20 aa, Severe acute respiratory syndrome coronavirus 2
NTVIWDYKRDAPAHISTIGV

SEQ ID NO: 96724 - protein, 20 aa, Severe acute respiratory syndrome coronavirus 2
TVIWDYKRDAPAHISTIGVC

SEQ ID NO: 96725 - protein, 20 aa, Severe acute respiratory syndrome coronavirus 2
VIWDYKRDAPAHISTIGVCS

SEQ ID NO: 96726 - protein, 20 aa, Severe acute respiratory syndrome coronavirus 2
IWDYKRDAPAHISTIGVCSM

SEQ ID NO: 96727 - protein, 20 aa, Severe acute respiratory syndrome coronavirus 2
WDYKRDAPAHISTIGVCSMT

SEQ ID NO: 96728 - protein, 20 aa, Severe acute respiratory syndrome coronavirus 2
DYKRDAPAHISTIGVCSMTD

SEQ ID NO: 96729 - protein, 20 aa, Severe acute respiratory syndrome coronavirus 2
YKRDAPAHISTIGVCSMTDI

SEQ ID NO: 96730 - protein, 20 aa, Severe acute respiratory syndrome coronavirus 2
KRDAPAHISTIGVCSMTDIA

SEQ ID NO: 96731 - protein, 20 aa, Severe acute respiratory syndrome coronavirus 2
RDAPAHISTIGVCSMTDIAK

SEQ ID NO: 96732 - protein, 20 aa, Severe acute respiratory syndrome coronavirus 2
DAPAHISTIGVCSMTDIAKK

SEQ ID NO: 96733 - protein, 20 aa, Severe acute respiratory syndrome coronavirus 2
APAHISTIGVCSMTDIAKKP

SEQ ID NO: 96734 - protein, 20 aa, Severe acute respiratory syndrome coronavirus 2
PAHISTIGVCSMTDIAKKPT

SEQ ID NO: 96735 - protein, 20 aa, Severe acute respiratory syndrome coronavirus 2
AHISTIGVCSMTDIAKKPTE

SEQ ID NO: 96736 - protein, 20 aa, Severe acute respiratory syndrome coronavirus 2
EGSVKGLQPSVGPKQASLNG

SEQ ID NO: 96737 - protein, 20 aa, Severe acute respiratory syndrome coronavirus 2
GSVKGLQPSVGPKQASLNGV

SEQ ID NO: 96738 - protein, 20 aa, Severe acute respiratory syndrome coronavirus 2
SVKGLQPSVGPKQASLNGVT

SEQ ID NO: 96739 - protein, 20 aa, Severe acute respiratory syndrome coronavirus 2
VKGLQPSVGPKQASLNGVTL

SEQ ID NO: 96740 - protein, 20 aa, Severe acute respiratory syndrome coronavirus 2
KGLQPSVGPKQASLNGVTLI

SEQ ID NO: 96741 - protein, 20 aa, Severe acute respiratory syndrome coronavirus 2
GLQPSVGPKQASLNGVTLIG

SEQ ID NO: 96742 - protein, 20 aa, Severe acute respiratory syndrome coronavirus 2
LQPSVGPKQASLNGVTLIGE

SEQ ID NO: 96743 - protein, 20 aa, Severe acute respiratory syndrome coronavirus 2
QPSVGPKQASLNGVTLIGEA

SEQ ID NO: 96744 - protein, 20 aa, Severe acute respiratory syndrome coronavirus 2
KTQFNYYKKVDGVVQQLPET

SEQ ID NO: 96745 - protein, 20 aa, Severe acute respiratory syndrome coronavirus 2
TQFNYYKKVDGVVQQLPETY

SEQ ID NO: 96746 - protein, 20 aa, Severe acute respiratory syndrome coronavirus 2
QFNYYKKVDGVVQQLPETYF

SEQ ID NO: 96747 - protein, 20 aa, Severe acute respiratory syndrome coronavirus 2
FNYYKKVDGVVQQLPETYFT

SEQ ID NO: 96748 - protein, 20 aa, Severe acute respiratory syndrome coronavirus 2
NYYKKVDGVVQQLPETYFTQ

SEQ ID NO: 96749 - protein, 20 aa, Severe acute respiratory syndrome coronavirus 2
YYKKVDGVVQQLPETYFTQS

SEQ ID NO: 96750 - protein, 20 aa, Severe acute respiratory syndrome coronavirus 2
YKKVDGVVQQLPETYFTQSR

SEQ ID NO: 96751 - protein, 20 aa, Severe acute respiratory syndrome coronavirus 2
KKVDGVVQQLPETYFTQSRN

SEQ ID NO: 96752 - protein, 20 aa, Severe acute respiratory syndrome coronavirus 2
KVDGVVQQLPETYFTQSRNL

SEQ ID NO: 96753 - protein, 20 aa, Severe acute respiratory syndrome coronavirus 2
VDGVVQQLPETYFTQSRNLQ

SEQ ID NO: 96754 - protein, 20 aa, Severe acute respiratory syndrome coronavirus 2
DGVVQQLPETYFTQSRNLQE

SEQ ID NO: 96755 - protein, 20 aa, Severe acute respiratory syndrome coronavirus 2
GVVQQLPETYFTQSRNLQEF

SEQ ID NO: 96756 - protein, 20 aa, Severe acute respiratory syndrome coronavirus 2
VVQQLPETYFTQSRNLQEFK

SEQ ID NO: 96757 - protein, 20 aa, Severe acute respiratory syndrome coronavirus 2
VQQLPETYFTQSRNLQEFKP

SEQ ID NO: 96758 - protein, 20 aa, Severe acute respiratory syndrome coronavirus 2
LPKGIMMNVAKYTQLCQYLN

SEQ ID NO: 96759 - protein, 20 aa, Severe acute respiratory syndrome coronavirus 2
VAKYTQLCQYLNTLTLAVPY

SEQ ID NO: 96760 - protein, 20 aa, Severe acute respiratory syndrome coronavirus 2
AKYTQLCQYLNTLTLAVPYN

SEQ ID NO: 96761 - protein, 20 aa, Severe acute respiratory syndrome coronavirus 2
LTLAVPYNMRVIHFGAGSDK

SEQ ID NO: 96762 - protein, 20 aa, Severe acute respiratory syndrome coronavirus 2
VAPGTAVLRQWLPTGTLLVD

SEQ ID NO: 96763 - protein, 20 aa, Severe acute respiratory syndrome coronavirus 2
APGTAVLRQWLPTGTLLVDS

SEQ ID NO: 96764 - protein, 20 aa, Severe acute respiratory syndrome coronavirus 2
PGTAVLRQWLPTGTLLVDSD

SEQ ID NO: 96765 - protein, 20 aa, Severe acute respiratory syndrome coronavirus 2
GTAVLRQWLPTGTLLVDSDL

SEQ ID NO: 96766 - protein, 20 aa, Severe acute respiratory syndrome coronavirus 2
TAVLRQWLPTGTLLVDSDLN

SEQ ID NO: 96767 - protein, 20 aa, Severe acute respiratory syndrome coronavirus 2
AVLRQWLPTGTLLVDSDLND

SEQ ID NO: 96768 - protein, 20 aa, Severe acute respiratory syndrome coronavirus 2
VLRQWLPTGTLLVDSDLNDF

SEQ ID NO: 96769 - protein, 20 aa, Severe acute respiratory syndrome coronavirus 2
LRQWLPTGTLLVDSDLNDFV

SEQ ID NO: 96770 - protein, 20 aa, Severe acute respiratory syndrome coronavirus 2
RQWLPTGTLLVDSDLNDFVS

SEQ ID NO: 96771 - protein, 20 aa, Severe acute respiratory syndrome coronavirus 2
QWLPTGTLLVDSDLNDFVSD

SEQ ID NO: 96772 - protein, 20 aa, Severe acute respiratory syndrome coronavirus 2
WLPTGTLLVDSDLNDFVSDA

SEQ ID NO: 96773 - protein, 20 aa, Severe acute respiratory syndrome coronavirus 2
AIKITEHSWNADLYKLMGHF

SEQ ID NO: 96774 - protein, 20 aa, Severe acute respiratory syndrome coronavirus 2
LSSYSLFDMSKFPLKLRGTA

SEQ ID NO: 96775 - protein, 20 aa, Severe acute respiratory syndrome coronavirus 2
SSYSLFDMSKFPLKLRGTAV

SEQ ID NO: 96776 - protein, 20 aa, Severe acute respiratory syndrome coronavirus 2
SYSLFDMSKFPLKLRGTAVM

SEQ ID NO: 96777 - protein, 20 aa, Severe acute respiratory syndrome coronavirus 2
YSLFDMSKFPLKLRGTAVMS

SEQ ID NO: 96778 - protein, 20 aa, Severe acute respiratory syndrome coronavirus 2
SLFDMSKFPLKLRGTAVMSL

SEQ ID NO: 96779 - protein, 20 aa, Severe acute respiratory syndrome coronavirus 2
LFDMSKFPLKLRGTAVMSLK

SEQ ID NO: 96780 - protein, 20 aa, Severe acute respiratory syndrome coronavirus 2
FDMSKFPLKLRGTAVMSLKE

SEQ ID NO: 96781 - protein, 20 aa, Severe acute respiratory syndrome coronavirus 2
QINDMILSLLSKGRLIIREN

SEQ ID NO: 96782 - protein, 20 aa, Severe acute respiratory syndrome coronavirus 2
INDMILSLLSKGRLIIRENN

SEQ ID NO: 96783 - protein, 20 aa, Severe acute respiratory syndrome coronavirus 2
NDMILSLLSKGRLIIRENNR

SEQ ID NO: 96784 - protein, 21 aa, Severe acute respiratory syndrome coronavirus 2
KHDFFKFRIDGDMVPHISRQR

SEQ ID NO: 96785 - protein, 21 aa, Severe acute respiratory syndrome coronavirus 2
HDFFKFRIDGDMVPHISRQRL

SEQ ID NO: 96786 - protein, 21 aa, Severe acute respiratory syndrome coronavirus 2
DFFKFRIDGDMVPHISRQRLT

SEQ ID NO: 96787 - protein, 21 aa, Severe acute respiratory syndrome coronavirus 2
FFKFRIDGDMVPHISRQRLTK

SEQ ID NO: 96788 - protein, 21 aa, Severe acute respiratory syndrome coronavirus 2
FKFRIDGDMVPHISRQRLTKY

SEQ ID NO: 96789 - protein, 21 aa, Severe acute respiratory syndrome coronavirus 2
KFRIDGDMVPHISRQRLTKYT

SEQ ID NO: 96790 - protein, 21 aa, Severe acute respiratory syndrome coronavirus 2
FRIDGDMVPHISRQRLTKYTM

SEQ ID NO: 96791 - protein, 21 aa, Severe acute respiratory syndrome coronavirus 2
RIDGDMVPHISRQRLTKYTMA

SEQ ID NO: 96792 - protein, 21 aa, Severe acute respiratory syndrome coronavirus 2
IDGDMVPHISRQRLTKYTMAD

SEQ ID NO: 96793 - protein, 21 aa, Severe acute respiratory syndrome coronavirus 2
DGDMVPHISRQRLTKYTMADL

SEQ ID NO: 96794 - protein, 21 aa, Severe acute respiratory syndrome coronavirus 2
VPHISRQRLTKYTMADLVYAL

SEQ ID NO: 96795 - protein, 21 aa, Severe acute respiratory syndrome coronavirus 2
PHISRQRLTKYTMADLVYALR

SEQ ID NO: 96796 - protein, 21 aa, Severe acute respiratory syndrome coronavirus 2
HISRQRLTKYTMADLVYALRH

SEQ ID NO: 96797 - protein, 21 aa, Severe acute respiratory syndrome coronavirus 2
ISRQRLTKYTMADLVYALRHF

SEQ ID NO: 96798 - protein, 21 aa, Severe acute respiratory syndrome coronavirus 2
SRQRLTKYTMADLVYALRHFD

SEQ ID NO: 96799 - protein, 21 aa, Severe acute respiratory syndrome coronavirus 2
RQRLTKYTMADLVYALRHFDE

SEQ ID NO: 96800 - protein, 21 aa, Severe acute respiratory syndrome coronavirus 2
QRLTKYTMADLVYALRHFDEG

SEQ ID NO: 96801 - protein, 21 aa, Severe acute respiratory syndrome coronavirus 2
RLTKYTMADLVYALRHFDEGN

SEQ ID NO: 96802 - protein, 21 aa, Severe acute respiratory syndrome coronavirus 2
LTKYTMADLVYALRHFDEGNC

SEQ ID NO: 96803 - protein, 21 aa, Severe acute respiratory syndrome coronavirus 2
TKYTMADLVYALRHFDEGNCD

SEQ ID NO: 96804 - protein, 21 aa, Severe acute respiratory syndrome coronavirus 2
VQFCDAMRNAGIVGVLTLDNQ

SEQ ID NO: 96805 - protein, 21 aa, Severe acute respiratory syndrome coronavirus 2
QFCDAMRNAGIVGVLTLDNQD

SEQ ID NO: 96806 - protein, 21 aa, Severe acute respiratory syndrome coronavirus 2
FCDAMRNAGIVGVLTLDNQDL

SEQ ID NO: 96807 - protein, 21 aa, Severe acute respiratory syndrome coronavirus 2
CDAMRNAGIVGVLTLDNQDLN

SEQ ID NO: 96808 - protein, 21 aa, Severe acute respiratory syndrome coronavirus 2
DAMRNAGIVGVLTLDNQDLNG

SEQ ID NO: 96809 - protein, 21 aa, Severe acute respiratory syndrome coronavirus 2
AMRNAGIVGVLTLDNQDLNGN

SEQ ID NO: 96810 - protein, 21 aa, Severe acute respiratory syndrome coronavirus 2
MRNAGIVGVLTLDNQDLNGNW

SEQ ID NO: 96811 - protein, 21 aa, Severe acute respiratory syndrome coronavirus 2
RNAGIVGVLTLDNQDLNGNWY

SEQ ID NO: 96812 - protein, 21 aa, Severe acute respiratory syndrome coronavirus 2
NAGIVGVLTLDNQDLNGNWYD

SEQ ID NO: 96813 - protein, 21 aa, Severe acute respiratory syndrome coronavirus 2
AGIVGVLTLDNQDLNGNWYDF

SEQ ID NO: 96814 - protein, 21 aa, Severe acute respiratory syndrome coronavirus 2
GIVGVLTLDNQDLNGNWYDFG

SEQ ID NO: 96815 - protein, 21 aa, Severe acute respiratory syndrome coronavirus 2
IVGVLTLDNQDLNGNWYDFGD

SEQ ID NO: 96816 - protein, 21 aa, Severe acute respiratory syndrome coronavirus 2
VGVLTLDNQDLNGNWYDFGDF

SEQ ID NO: 96817 - protein, 21 aa, Severe acute respiratory syndrome coronavirus 2
ESHVDTDLTKPYIKWDLLKYD

SEQ ID NO: 96818 - protein, 21 aa, Severe acute respiratory syndrome coronavirus 2
SHVDTDLTKPYIKWDLLKYDF

SEQ ID NO: 96819 - protein, 21 aa, Severe acute respiratory syndrome coronavirus 2
VRKIFVDGVPFVVSTGYHFRE

SEQ ID NO: 96820 - protein, 21 aa, Severe acute respiratory syndrome coronavirus 2
RKIFVDGVPFVVSTGYHFREL

SEQ ID NO: 96821 - protein, 21 aa, Severe acute respiratory syndrome coronavirus 2
KIFVDGVPFVVSTGYHFRELG

SEQ ID NO: 96822 - protein, 21 aa, Severe acute respiratory syndrome coronavirus 2
IFVDGVPFVVSTGYHFRELGV

SEQ ID NO: 96823 - protein, 21 aa, Severe acute respiratory syndrome coronavirus 2
FVDGVPFVVSTGYHFRELGVV

SEQ ID NO: 96824 - protein, 21 aa, Severe acute respiratory syndrome coronavirus 2
VDGVPFVVSTGYHFRELGVVH

SEQ ID NO: 96825 - protein, 21 aa, Severe acute respiratory syndrome coronavirus 2
DGVPFVVSTGYHFRELGVVHN

SEQ ID NO: 96826 - protein, 21 aa, Severe acute respiratory syndrome coronavirus 2
DVNLHSSRLSFKELLVYAADP

SEQ ID NO: 96827 - protein, 21 aa, Severe acute respiratory syndrome coronavirus 2
VNLHSSRLSFKELLVYAADPA

SEQ ID NO: 96828 - protein, 21 aa, Severe acute respiratory syndrome coronavirus 2
ISDYDYYRYNLPTMCDIRQLL

SEQ ID NO: 96829 - protein, 21 aa, Severe acute respiratory syndrome coronavirus 2
SDYDYYRYNLPTMCDIRQLLF

SEQ ID NO: 96830 - protein, 21 aa, Severe acute respiratory syndrome coronavirus 2
QVIVNNLDKSAGFPFNKWGKA

SEQ ID NO: 96831 - protein, 21 aa, Severe acute respiratory syndrome coronavirus 2
VIVNNLDKSAGFPFNKWGKAR

SEQ ID NO: 96832 - protein, 21 aa, Severe acute respiratory syndrome coronavirus 2
YTKRNVIPTITQMNLKYAISA

SEQ ID NO: 96833 - protein, 21 aa, Severe acute respiratory syndrome coronavirus 2
TKRNVIPTITQMNLKYAISAK

SEQ ID NO: 96834 - protein, 21 aa, Severe acute respiratory syndrome coronavirus 2
KRNVIPTITQMNLKYAISAKN

SEQ ID NO: 96835 - protein, 21 aa, Severe acute respiratory syndrome coronavirus 2
RNVIPTITQMNLKYAISAKNR

SEQ ID NO: 96836 - protein, 21 aa, Severe acute respiratory syndrome coronavirus 2
NVIPTITQMNLKYAISAKNRA

SEQ ID NO: 96837 - protein, 21 aa, Severe acute respiratory syndrome coronavirus 2
VIPTITQMNLKYAISAKNRAR

SEQ ID NO: 96838 - protein, 21 aa, Severe acute respiratory syndrome coronavirus 2
IPTITQMNLKYAISAKNRART

SEQ ID NO: 96839 - protein, 21 aa, Severe acute respiratory syndrome coronavirus 2
PTITQMNLKYAISAKNRARTV

SEQ ID NO: 96840 - protein, 21 aa, Severe acute respiratory syndrome coronavirus 2
TITQMNLKYAISAKNRARTVA

SEQ ID NO: 96841 - protein, 21 aa, Severe acute respiratory syndrome coronavirus 2
ITQMNLKYAISAKNRARTVAG

SEQ ID NO: 96842 - protein, 21 aa, Severe acute respiratory syndrome coronavirus 2
TQMNLKYAISAKNRARTVAGV

SEQ ID NO: 96843 - protein, 21 aa, Severe acute respiratory syndrome coronavirus 2
QMNLKYAISAKNRARTVAGVS

SEQ ID NO: 96844 - protein, 21 aa, Severe acute respiratory syndrome coronavirus 2
MNLKYAISAKNRARTVAGVSI

SEQ ID NO: 96845 - protein, 21 aa, Severe acute respiratory syndrome coronavirus 2
NLKYAISAKNRARTVAGVSIC

SEQ ID NO: 96846 - protein, 21 aa, Severe acute respiratory syndrome coronavirus 2
LKYAISAKNRARTVAGVSICS

SEQ ID NO: 96847 - protein, 21 aa, Severe acute respiratory syndrome coronavirus 2
KYAISAKNRARTVAGVSICST

SEQ ID NO: 96848 - protein, 21 aa, Severe acute respiratory syndrome coronavirus 2
YAISAKNRARTVAGVSICSTM

SEQ ID NO: 96849 - protein, 21 aa, Severe acute respiratory syndrome coronavirus 2
AISAKNRARTVAGVSICSTMT

SEQ ID NO: 96850 - protein, 21 aa, Severe acute respiratory syndrome coronavirus 2
ISAKNRARTVAGVSICSTMTN

SEQ ID NO: 96851 - protein, 21 aa, Severe acute respiratory syndrome coronavirus 2
SAKNRARTVAGVSICSTMTNR

SEQ ID NO: 96852 - protein, 21 aa, Severe acute respiratory syndrome coronavirus 2
AKNRARTVAGVSICSTMTNRQ

SEQ ID NO: 96853 - protein, 21 aa, Severe acute respiratory syndrome coronavirus 2
KNRARTVAGVSICSTMTNRQF

SEQ ID NO: 96854 - protein, 21 aa, Severe acute respiratory syndrome coronavirus 2
NRARTVAGVSICSTMTNRQFH

SEQ ID NO: 96855 - protein, 21 aa, Severe acute respiratory syndrome coronavirus 2
RARTVAGVSICSTMTNRQFHQ

SEQ ID NO: 96856 - protein, 21 aa, Severe acute respiratory syndrome coronavirus 2
ARTVAGVSICSTMTNRQFHQK

SEQ ID NO: 96857 - protein, 21 aa, Severe acute respiratory syndrome coronavirus 2
RTVAGVSICSTMTNRQFHQKL

SEQ ID NO: 96858 - protein, 21 aa, Severe acute respiratory syndrome coronavirus 2
TVAGVSICSTMTNRQFHQKLL

SEQ ID NO: 96859 - protein, 21 aa, Severe acute respiratory syndrome coronavirus 2
VAGVSICSTMTNRQFHQKLLK

SEQ ID NO: 96860 - protein, 21 aa, Severe acute respiratory syndrome coronavirus 2
AGVSICSTMTNRQFHQKLLKS

SEQ ID NO: 96861 - protein, 21 aa, Severe acute respiratory syndrome coronavirus 2
GVSICSTMTNRQFHQKLLKSI

SEQ ID NO: 96862 - protein, 21 aa, Severe acute respiratory syndrome coronavirus 2
VSICSTMTNRQFHQKLLKSIA

SEQ ID NO: 96863 - protein, 21 aa, Severe acute respiratory syndrome coronavirus 2
SICSTMTNRQFHQKLLKSIAA

SEQ ID NO: 96864 - protein, 21 aa, Severe acute respiratory syndrome coronavirus 2
ICSTMTNRQFHQKLLKSIAAT

SEQ ID NO: 96865 - protein, 21 aa, Severe acute respiratory syndrome coronavirus 2
CSTMTNRQFHQKLLKSIAATR

SEQ ID NO: 96866 - protein, 21 aa, Severe acute respiratory syndrome coronavirus 2
STMTNRQFHQKLLKSIAATRG

SEQ ID NO: 96867 - protein, 21 aa, Severe acute respiratory syndrome coronavirus 2
TMTNRQFHQKLLKSIAATRGA

SEQ ID NO: 96868 - protein, 21 aa, Severe acute respiratory syndrome coronavirus 2
MTNRQFHQKLLKSIAATRGAT

SEQ ID NO: 96869 - protein, 21 aa, Severe acute respiratory syndrome coronavirus 2
CGGSLYVKPGGTSSGDATTAY

SEQ ID NO: 96870 - protein, 21 aa, Severe acute respiratory syndrome coronavirus 2
GGSLYVKPGGTSSGDATTAYA

SEQ ID NO: 96871 - protein, 21 aa, Severe acute respiratory syndrome coronavirus 2
GSLYVKPGGTSSGDATTAYAN

SEQ ID NO: 96872 - protein, 21 aa, Severe acute respiratory syndrome coronavirus 2
SLYVKPGGTSSGDATTAYANS

SEQ ID NO: 96873 - protein, 21 aa, Severe acute respiratory syndrome coronavirus 2
LYVKPGGTSSGDATTAYANSV

SEQ ID NO: 96874 - protein, 21 aa, Severe acute respiratory syndrome coronavirus 2
YVKPGGTSSGDATTAYANSVF

SEQ ID NO: 96875 - protein, 21 aa, Severe acute respiratory syndrome coronavirus 2
VKPGGTSSGDATTAYANSVFN

SEQ ID NO: 96876 - protein, 21 aa, Severe acute respiratory syndrome coronavirus 2
KPGGTSSGDATTAYANSVFNI

SEQ ID NO: 96877 - protein, 21 aa, Severe acute respiratory syndrome coronavirus 2
PGGTSSGDATTAYANSVFNIC

SEQ ID NO: 96878 - protein, 21 aa, Severe acute respiratory syndrome coronavirus 2
GGTSSGDATTAYANSVFNICQ

SEQ ID NO: 96879 - protein, 21 aa, Severe acute respiratory syndrome coronavirus 2
GTSSGDATTAYANSVFNICQA

SEQ ID NO: 96880 - protein, 21 aa, Severe acute respiratory syndrome coronavirus 2
TSSGDATTAYANSVFNICQAV

SEQ ID NO: 96881 - protein, 21 aa, Severe acute respiratory syndrome coronavirus 2
SSGDATTAYANSVFNICQAVT

SEQ ID NO: 96882 - protein, 21 aa, Severe acute respiratory syndrome coronavirus 2
SGDATTAYANSVFNICQAVTA

SEQ ID NO: 96883 - protein, 21 aa, Severe acute respiratory syndrome coronavirus 2
GDATTAYANSVFNICQAVTAN

SEQ ID NO: 96884 - protein, 21 aa, Severe acute respiratory syndrome coronavirus 2
DATTAYANSVFNICQAVTANV

SEQ ID NO: 96885 - protein, 21 aa, Severe acute respiratory syndrome coronavirus 2
ATTAYANSVFNICQAVTANVN

SEQ ID NO: 96886 - protein, 21 aa, Severe acute respiratory syndrome coronavirus 2
TTAYANSVFNICQAVTANVNA

SEQ ID NO: 96887 - protein, 21 aa, Severe acute respiratory syndrome coronavirus 2
TAYANSVFNICQAVTANVNAL

SEQ ID NO: 96888 - protein, 21 aa, Severe acute respiratory syndrome coronavirus 2
AYANSVFNICQAVTANVNALL

SEQ ID NO: 96889 - protein, 21 aa, Severe acute respiratory syndrome coronavirus 2
YANSVFNICQAVTANVNALLS

SEQ ID NO: 96890 - protein, 21 aa, Severe acute respiratory syndrome coronavirus 2
ANSVFNICQAVTANVNALLST

SEQ ID NO: 96891 - protein, 21 aa, Severe acute respiratory syndrome coronavirus 2
NSVFNICQAVTANVNALLSTD

SEQ ID NO: 96892 - protein, 21 aa, Severe acute respiratory syndrome coronavirus 2
SVFNICQAVTANVNALLSTDG

SEQ ID NO: 96893 - protein, 21 aa, Severe acute respiratory syndrome coronavirus 2
VFNICQAVTANVNALLSTDGN

SEQ ID NO: 96894 - protein, 21 aa, Severe acute respiratory syndrome coronavirus 2
FNICQAVTANVNALLSTDGNK

SEQ ID NO: 96895 - protein, 21 aa, Severe acute respiratory syndrome coronavirus 2
NICQAVTANVNALLSTDGNKI

SEQ ID NO: 96896 - protein, 21 aa, Severe acute respiratory syndrome coronavirus 2
ICQAVTANVNALLSTDGNKIA

SEQ ID NO: 96897 - protein, 21 aa, Severe acute respiratory syndrome coronavirus 2
CQAVTANVNALLSTDGNKIAD

SEQ ID NO: 96898 - protein, 21 aa, Severe acute respiratory syndrome coronavirus 2
QAVTANVNALLSTDGNKIADK

SEQ ID NO: 96899 - protein, 21 aa, Severe acute respiratory syndrome coronavirus 2
AVTANVNALLSTDGNKIADKY

SEQ ID NO: 96900 - protein, 21 aa, Severe acute respiratory syndrome coronavirus 2
VTANVNALLSTDGNKIADKYV

SEQ ID NO: 96901 - protein, 21 aa, Severe acute respiratory syndrome coronavirus 2
TANVNALLSTDGNKIADKYVR

SEQ ID NO: 96902 - protein, 21 aa, Severe acute respiratory syndrome coronavirus 2
ANVNALLSTDGNKIADKYVRN

SEQ ID NO: 96903 - protein, 21 aa, Severe acute respiratory syndrome coronavirus 2
NVNALLSTDGNKIADKYVRNL

SEQ ID NO: 96904 - protein, 21 aa, Severe acute respiratory syndrome coronavirus 2
VNALLSTDGNKIADKYVRNLQ

SEQ ID NO: 96905 - protein, 21 aa, Severe acute respiratory syndrome coronavirus 2
NALLSTDGNKIADKYVRNLQH

SEQ ID NO: 96906 - protein, 21 aa, Severe acute respiratory syndrome coronavirus 2
ALLSTDGNKIADKYVRNLQHR

SEQ ID NO: 96907 - protein, 21 aa, Severe acute respiratory syndrome coronavirus 2
LLSTDGNKIADKYVRNLQHRL

SEQ ID NO: 96908 - protein, 21 aa, Severe acute respiratory syndrome coronavirus 2
LSTDGNKIADKYVRNLQHRLY

SEQ ID NO: 96909 - protein, 21 aa, Severe acute respiratory syndrome coronavirus 2
STDGNKIADKYVRNLQHRLYE

SEQ ID NO: 96910 - protein, 21 aa, Severe acute respiratory syndrome coronavirus 2
TDGNKIADKYVRNLQHRLYEC

SEQ ID NO: 96911 - protein, 21 aa, Severe acute respiratory syndrome coronavirus 2
DGNKIADKYVRNLQHRLYECL

SEQ ID NO: 96912 - protein, 21 aa, Severe acute respiratory syndrome coronavirus 2
GNKIADKYVRNLQHRLYECLY

SEQ ID NO: 96913 - protein, 21 aa, Severe acute respiratory syndrome coronavirus 2
NKIADKYVRNLQHRLYECLYR

SEQ ID NO: 96914 - protein, 21 aa, Severe acute respiratory syndrome coronavirus 2
FYAYLRKHFSMMILSDDAVVC

SEQ ID NO: 96915 - protein, 21 aa, Severe acute respiratory syndrome coronavirus 2
YAYLRKHFSMMILSDDAVVCF

SEQ ID NO: 96916 - protein, 21 aa, Severe acute respiratory syndrome coronavirus 2
LVASIKNFKSVLYYQNNVFMS

SEQ ID NO: 96917 - protein, 21 aa, Severe acute respiratory syndrome coronavirus 2
VASIKNFKSVLYYQNNVFMSE

SEQ ID NO: 96918 - protein, 21 aa, Severe acute respiratory syndrome coronavirus 2
ASIKNFKSVLYYQNNVFMSEA

SEQ ID NO: 96919 - protein, 21 aa, Severe acute respiratory syndrome coronavirus 2
SIKNFKSVLYYQNNVFMSEAK

SEQ ID NO: 96920 - protein, 21 aa, Severe acute respiratory syndrome coronavirus 2
IKNFKSVLYYQNNVFMSEAKC

SEQ ID NO: 96921 - protein, 21 aa, Severe acute respiratory syndrome coronavirus 2
KNFKSVLYYQNNVFMSEAKCW

SEQ ID NO: 96922 - protein, 21 aa, Severe acute respiratory syndrome coronavirus 2
NFKSVLYYQNNVFMSEAKCWT

SEQ ID NO: 96923 - protein, 21 aa, Severe acute respiratory syndrome coronavirus 2
FKSVLYYQNNVFMSEAKCWTE

SEQ ID NO: 96924 - protein, 21 aa, Severe acute respiratory syndrome coronavirus 2
KSVLYYQNNVFMSEAKCWTET

SEQ ID NO: 96925 - protein, 21 aa, Severe acute respiratory syndrome coronavirus 2
SVLYYQNNVFMSEAKCWTETD

SEQ ID NO: 96926 - protein, 21 aa, Severe acute respiratory syndrome coronavirus 2
VLYYQNNVFMSEAKCWTETDL

SEQ ID NO: 96927 - protein, 21 aa, Severe acute respiratory syndrome coronavirus 2
PSRILGAGCFVDDIVKTDGTL

SEQ ID NO: 96928 - protein, 21 aa, Severe acute respiratory syndrome coronavirus 2
SRILGAGCFVDDIVKTDGTLM

SEQ ID NO: 96929 - protein, 21 aa, Severe acute respiratory syndrome coronavirus 2
RILGAGCFVDDIVKTDGTLMI

SEQ ID NO: 96930 - protein, 21 aa, Severe acute respiratory syndrome coronavirus 2
ILGAGCFVDDIVKTDGTLMIE

SEQ ID NO: 96931 - protein, 21 aa, Severe acute respiratory syndrome coronavirus 2
LGAGCFVDDIVKTDGTLMIER

SEQ ID NO: 96932 - protein, 21 aa, Severe acute respiratory syndrome coronavirus 2
GAGCFVDDIVKTDGTLMIERF

SEQ ID NO: 96933 - protein, 21 aa, Severe acute respiratory syndrome coronavirus 2
AGCFVDDIVKTDGTLMIERFV

SEQ ID NO: 96934 - protein, 21 aa, Severe acute respiratory syndrome coronavirus 2
GCFVDDIVKTDGTLMIERFVS

SEQ ID NO: 96935 - protein, 21 aa, Severe acute respiratory syndrome coronavirus 2
CFVDDIVKTDGTLMIERFVSL

SEQ ID NO: 96936 - protein, 21 aa, Severe acute respiratory syndrome coronavirus 2
FVDDIVKTDGTLMIERFVSLA

SEQ ID NO: 96937 - protein, 21 aa, Severe acute respiratory syndrome coronavirus 2
VDDIVKTDGTLMIERFVSLAI

SEQ ID NO: 96938 - protein, 21 aa, Severe acute respiratory syndrome coronavirus 2
DDIVKTDGTLMIERFVSLAID

SEQ ID NO: 96939 - protein, 21 aa, Severe acute respiratory syndrome coronavirus 2
DIVKTDGTLMIERFVSLAIDA

SEQ ID NO: 96940 - protein, 21 aa, Severe acute respiratory syndrome coronavirus 2
IVKTDGTLMIERFVSLAIDAY

SEQ ID NO: 96941 - protein, 21 aa, Severe acute respiratory syndrome coronavirus 2
VKTDGTLMIERFVSLAIDAYP

SEQ ID NO: 96942 - protein, 21 aa, Severe acute respiratory syndrome coronavirus 2
ISFPLCANGQVFGLYKNTCVG

SEQ ID NO: 96943 - protein, 21 aa, Severe acute respiratory syndrome coronavirus 2
VTDFNAIATCDWTNAGDYILA

SEQ ID NO: 96944 - protein, 21 aa, Severe acute respiratory syndrome coronavirus 2
TDFNAIATCDWTNAGDYILAN

SEQ ID NO: 96945 - protein, 21 aa, Severe acute respiratory syndrome coronavirus 2
DFNAIATCDWTNAGDYILANT

SEQ ID NO: 96946 - protein, 21 aa, Severe acute respiratory syndrome coronavirus 2
FNAIATCDWTNAGDYILANTC

SEQ ID NO: 96947 - protein, 21 aa, Severe acute respiratory syndrome coronavirus 2
EETFKLSYGIATVREVLSDRE

SEQ ID NO: 96948 - protein, 21 aa, Severe acute respiratory syndrome coronavirus 2
ETFKLSYGIATVREVLSDREL

SEQ ID NO: 96949 - protein, 21 aa, Severe acute respiratory syndrome coronavirus 2
VYTACSHAAVDALCEKALKYL

SEQ ID NO: 96950 - protein, 21 aa, Severe acute respiratory syndrome coronavirus 2
YTACSHAAVDALCEKALKYLP

SEQ ID NO: 96951 - protein, 21 aa, Severe acute respiratory syndrome coronavirus 2
HAAVDALCEKALKYLPIDKCS

SEQ ID NO: 96952 - protein, 21 aa, Severe acute respiratory syndrome coronavirus 2
AAVDALCEKALKYLPIDKCSR

SEQ ID NO: 96953 - protein, 21 aa, Severe acute respiratory syndrome coronavirus 2
AVDALCEKALKYLPIDKCSRI

SEQ ID NO: 96954 - protein, 21 aa, Severe acute respiratory syndrome coronavirus 2
VDALCEKALKYLPIDKCSRII

SEQ ID NO: 96955 - protein, 21 aa, Severe acute respiratory syndrome coronavirus 2
DALCEKALKYLPIDKCSRIIP

SEQ ID NO: 96956 - protein, 21 aa, Severe acute respiratory syndrome coronavirus 2
ALCEKALKYLPIDKCSRIIPA

SEQ ID NO: 96957 - protein, 21 aa, Severe acute respiratory syndrome coronavirus 2
LCEKALKYLPIDKCSRIIPAR

SEQ ID NO: 96958 - protein, 21 aa, Severe acute respiratory syndrome coronavirus 2
CEKALKYLPIDKCSRIIPARA

SEQ ID NO: 96959 - protein, 21 aa, Severe acute respiratory syndrome coronavirus 2
EKALKYLPIDKCSRIIPARAR

SEQ ID NO: 96960 - protein, 21 aa, Severe acute respiratory syndrome coronavirus 2
KALKYLPIDKCSRIIPARARV

SEQ ID NO: 96961 - protein, 21 aa, Severe acute respiratory syndrome coronavirus 2
ALKYLPIDKCSRIIPARARVE

SEQ ID NO: 96962 - protein, 21 aa, Severe acute respiratory syndrome coronavirus 2
LKYLPIDKCSRIIPARARVEC

SEQ ID NO: 96963 - protein, 21 aa, Severe acute respiratory syndrome coronavirus 2
KYLPIDKCSRIIPARARVECF

SEQ ID NO: 96964 - protein, 21 aa, Severe acute respiratory syndrome coronavirus 2
YLPIDKCSRIIPARARVECFD

SEQ ID NO: 96965 - protein, 21 aa, Severe acute respiratory syndrome coronavirus 2
LPIDKCSRIIPARARVECFDK

SEQ ID NO: 96966 - protein, 21 aa, Severe acute respiratory syndrome coronavirus 2
PIDKCSRIIPARARVECFDKF

SEQ ID NO: 96967 - protein, 21 aa, Severe acute respiratory syndrome coronavirus 2
IDKCSRIIPARARVECFDKFK

SEQ ID NO: 96968 - protein, 21 aa, Severe acute respiratory syndrome coronavirus 2
GIPKDMTYRRLISMMGFKMNY

SEQ ID NO: 96969 - protein, 21 aa, Severe acute respiratory syndrome coronavirus 2
IPKDMTYRRLISMMGFKMNYQ

SEQ ID NO: 96970 - protein, 21 aa, Severe acute respiratory syndrome coronavirus 2
PKDMTYRRLISMMGFKMNYQV

SEQ ID NO: 96971 - protein, 21 aa, Severe acute respiratory syndrome coronavirus 2
KDMTYRRLISMMGFKMNYQVN

SEQ ID NO: 96972 - protein, 21 aa, Severe acute respiratory syndrome coronavirus 2
DMTYRRLISMMGFKMNYQVNG

SEQ ID NO: 96973 - protein, 21 aa, Severe acute respiratory syndrome coronavirus 2
MTYRRLISMMGFKMNYQVNGY

SEQ ID NO: 96974 - protein, 21 aa, Severe acute respiratory syndrome coronavirus 2
TYRRLISMMGFKMNYQVNGYP

SEQ ID NO: 96975 - protein, 21 aa, Severe acute respiratory syndrome coronavirus 2
YRRLISMMGFKMNYQVNGYPN

SEQ ID NO: 96976 - protein, 21 aa, Severe acute respiratory syndrome coronavirus 2
RRLISMMGFKMNYQVNGYPNM

SEQ ID NO: 96977 - protein, 21 aa, Severe acute respiratory syndrome coronavirus 2
RLISMMGFKMNYQVNGYPNMF

SEQ ID NO: 96978 - protein, 21 aa, Severe acute respiratory syndrome coronavirus 2
LISMMGFKMNYQVNGYPNMFI

SEQ ID NO: 96979 - protein, 21 aa, Severe acute respiratory syndrome coronavirus 2
ISMMGFKMNYQVNGYPNMFIT

SEQ ID NO: 96980 - protein, 21 aa, Severe acute respiratory syndrome coronavirus 2
SMMGFKMNYQVNGYPNMFITR

SEQ ID NO: 96981 - protein, 21 aa, Severe acute respiratory syndrome coronavirus 2
MMGFKMNYQVNGYPNMFITRE

SEQ ID NO: 96982 - protein, 21 aa, Severe acute respiratory syndrome coronavirus 2
MGFKMNYQVNGYPNMFITREE

SEQ ID NO: 96983 - protein, 21 aa, Severe acute respiratory syndrome coronavirus 2
GFKMNYQVNGYPNMFITREEA

SEQ ID NO: 96984 - protein, 21 aa, Severe acute respiratory syndrome coronavirus 2
FKMNYQVNGYPNMFITREEAI

SEQ ID NO: 96985 - protein, 21 aa, Severe acute respiratory syndrome coronavirus 2
HVRAWIGFDVEGCHATREAVG

SEQ ID NO: 96986 - protein, 21 aa, Severe acute respiratory syndrome coronavirus 2
VRAWIGFDVEGCHATREAVGT

SEQ ID NO: 96987 - protein, 21 aa, Severe acute respiratory syndrome coronavirus 2
EGCHATREAVGTNLPLQLGFS

SEQ ID NO: 96988 - protein, 21 aa, Severe acute respiratory syndrome coronavirus 2
SDRVVFVLWAHGFELTSMKYF

SEQ ID NO: 96989 - protein, 21 aa, Severe acute respiratory syndrome coronavirus 2
DRVVFVLWAHGFELTSMKYFV

SEQ ID NO: 96990 - protein, 21 aa, Severe acute respiratory syndrome coronavirus 2
RVVFVLWAHGFELTSMKYFVK

SEQ ID NO: 96991 - protein, 21 aa, Severe acute respiratory syndrome coronavirus 2
VVFVLWAHGFELTSMKYFVKI

SEQ ID NO: 96992 - protein, 21 aa, Severe acute respiratory syndrome coronavirus 2
VFVLWAHGFELTSMKYFVKIG

SEQ ID NO: 96993 - protein, 21 aa, Severe acute respiratory syndrome coronavirus 2
FVLWAHGFELTSMKYFVKIGP

SEQ ID NO: 96994 - protein, 21 aa, Severe acute respiratory syndrome coronavirus 2
VLWAHGFELTSMKYFVKIGPE

SEQ ID NO: 96995 - protein, 21 aa, Severe acute respiratory syndrome coronavirus 2
LWAHGFELTSMKYFVKIGPER

SEQ ID NO: 96996 - protein, 21 aa, Severe acute respiratory syndrome coronavirus 2
WAHGFELTSMKYFVKIGPERT

SEQ ID NO: 96997 - protein, 21 aa, Severe acute respiratory syndrome coronavirus 2
AHGFELTSMKYFVKIGPERTC

SEQ ID NO: 96998 - protein, 21 aa, Severe acute respiratory syndrome coronavirus 2
HGFELTSMKYFVKIGPERTCC

SEQ ID NO: 96999 - protein, 21 aa, Severe acute respiratory syndrome coronavirus 2
GFELTSMKYFVKIGPERTCCL

SEQ ID NO: 97000 - protein, 21 aa, Severe acute respiratory syndrome coronavirus 2
FELTSMKYFVKIGPERTCCLC

SEQ ID NO: 97001 - protein, 21 aa, Severe acute respiratory syndrome coronavirus 2
ELTSMKYFVKIGPERTCCLCD

SEQ ID NO: 97002 - protein, 21 aa, Severe acute respiratory syndrome coronavirus 2
DKFPVLHDIGNPKAIKCVPQA

SEQ ID NO: 97003 - protein, 21 aa, Severe acute respiratory syndrome coronavirus 2
KFPVLHDIGNPKAIKCVPQAD

SEQ ID NO: 97004 - protein, 21 aa, Severe acute respiratory syndrome coronavirus 2
GVCLFWNCNVDRYPANSIVCR

SEQ ID NO: 97005 - protein, 21 aa, Severe acute respiratory syndrome coronavirus 2
VCLFWNCNVDRYPANSIVCRF

SEQ ID NO: 97006 - protein, 21 aa, Severe acute respiratory syndrome coronavirus 2
CLFWNCNVDRYPANSIVCRFD

SEQ ID NO: 97007 - protein, 21 aa, Severe acute respiratory syndrome coronavirus 2
LFWNCNVDRYPANSIVCRFDT

SEQ ID NO: 97008 - protein, 21 aa, Severe acute respiratory syndrome coronavirus 2
FWNCNVDRYPANSIVCRFDTR

SEQ ID NO: 97009 - protein, 21 aa, Severe acute respiratory syndrome coronavirus 2
WNCNVDRYPANSIVCRFDTRV

SEQ ID NO: 97010 - protein, 21 aa, Severe acute respiratory syndrome coronavirus 2
NCNVDRYPANSIVCRFDTRVL

SEQ ID NO: 97011 - protein, 21 aa, Severe acute respiratory syndrome coronavirus 2
CNVDRYPANSIVCRFDTRVLS

SEQ ID NO: 97012 - protein, 21 aa, Severe acute respiratory syndrome coronavirus 2
NVDRYPANSIVCRFDTRVLSN

SEQ ID NO: 97013 - protein, 21 aa, Severe acute respiratory syndrome coronavirus 2
VDRYPANSIVCRFDTRVLSNL

SEQ ID NO: 97014 - protein, 21 aa, Severe acute respiratory syndrome coronavirus 2
DRYPANSIVCRFDTRVLSNLN

SEQ ID NO: 97015 - protein, 21 aa, Severe acute respiratory syndrome coronavirus 2
RYPANSIVCRFDTRVLSNLNL

SEQ ID NO: 97016 - protein, 21 aa, Severe acute respiratory syndrome coronavirus 2
DKSAFVNLKQLPFFYYSDSPC

SEQ ID NO: 97017 - protein, 21 aa, Severe acute respiratory syndrome coronavirus 2
KSAFVNLKQLPFFYYSDSPCE

SEQ ID NO: 97018 - protein, 21 aa, Severe acute respiratory syndrome coronavirus 2
SAFVNLKQLPFFYYSDSPCES

SEQ ID NO: 97019 - protein, 21 aa, Severe acute respiratory syndrome coronavirus 2
AFVNLKQLPFFYYSDSPCESH

SEQ ID NO: 97020 - protein, 21 aa, Severe acute respiratory syndrome coronavirus 2
FVNLKQLPFFYYSDSPCESHG

SEQ ID NO: 97021 - protein, 21 aa, Severe acute respiratory syndrome coronavirus 2
VNLKQLPFFYYSDSPCESHGK

SEQ ID NO: 97022 - protein, 21 aa, Severe acute respiratory syndrome coronavirus 2
VVSDIDYVPLKSATCITRCNL

SEQ ID NO: 97023 - protein, 21 aa, Severe acute respiratory syndrome coronavirus 2
VSDIDYVPLKSATCITRCNLG

SEQ ID NO: 97024 - protein, 21 aa, Severe acute respiratory syndrome coronavirus 2
ISAGFSLWVYKQFDTYNLWNT

SEQ ID NO: 97025 - protein, 21 aa, Severe acute respiratory syndrome coronavirus 2
SAGFSLWVYKQFDTYNLWNTF

SEQ ID NO: 97026 - protein, 21 aa, Severe acute respiratory syndrome coronavirus 2
KTTLPVNVAFELWAKRNIKPV

SEQ ID NO: 97027 - protein, 21 aa, Severe acute respiratory syndrome coronavirus 2
TTLPVNVAFELWAKRNIKPVP

SEQ ID NO: 97028 - protein, 21 aa, Severe acute respiratory syndrome coronavirus 2
TLPVNVAFELWAKRNIKPVPE

SEQ ID NO: 97029 - protein, 21 aa, Severe acute respiratory syndrome coronavirus 2
IAANTVIWDYKRDAPAHISTI

SEQ ID NO: 97030 - protein, 21 aa, Severe acute respiratory syndrome coronavirus 2
AANTVIWDYKRDAPAHISTIG

SEQ ID NO: 97031 - protein, 21 aa, Severe acute respiratory syndrome coronavirus 2
ANTVIWDYKRDAPAHISTIGV

SEQ ID NO: 97032 - protein, 21 aa, Severe acute respiratory syndrome coronavirus 2
NTVIWDYKRDAPAHISTIGVC

SEQ ID NO: 97033 - protein, 21 aa, Severe acute respiratory syndrome coronavirus 2
TVIWDYKRDAPAHISTIGVCS

SEQ ID NO: 97034 - protein, 21 aa, Severe acute respiratory syndrome coronavirus 2
VIWDYKRDAPAHISTIGVCSM

SEQ ID NO: 97035 - protein, 21 aa, Severe acute respiratory syndrome coronavirus 2
IWDYKRDAPAHISTIGVCSMT

SEQ ID NO: 97036 - protein, 21 aa, Severe acute respiratory syndrome coronavirus 2
WDYKRDAPAHISTIGVCSMTD

SEQ ID NO: 97037 - protein, 21 aa, Severe acute respiratory syndrome coronavirus 2
DYKRDAPAHISTIGVCSMTDI

SEQ ID NO: 97038 - protein, 21 aa, Severe acute respiratory syndrome coronavirus 2
YKRDAPAHISTIGVCSMTDIA

SEQ ID NO: 97039 - protein, 21 aa, Severe acute respiratory syndrome coronavirus 2
KRDAPAHISTIGVCSMTDIAK

SEQ ID NO: 97040 - protein, 21 aa, Severe acute respiratory syndrome coronavirus 2
RDAPAHISTIGVCSMTDIAKK

SEQ ID NO: 97041 - protein, 21 aa, Severe acute respiratory syndrome coronavirus 2
DAPAHISTIGVCSMTDIAKKP

SEQ ID NO: 97042 - protein, 21 aa, Severe acute respiratory syndrome coronavirus 2
APAHISTIGVCSMTDIAKKPT

SEQ ID NO: 97043 - protein, 21 aa, Severe acute respiratory syndrome coronavirus 2
PAHISTIGVCSMTDIAKKPTE

SEQ ID NO: 97044 - protein, 21 aa, Severe acute respiratory syndrome coronavirus 2
EGSVKGLQPSVGPKQASLNGV

SEQ ID NO: 97045 - protein, 21 aa, Severe acute respiratory syndrome coronavirus 2
GSVKGLQPSVGPKQASLNGVT

SEQ ID NO: 97046 - protein, 21 aa, Severe acute respiratory syndrome coronavirus 2
VKGLQPSVGPKQASLNGVTLI

SEQ ID NO: 97047 - protein, 21 aa, Severe acute respiratory syndrome coronavirus 2
KGLQPSVGPKQASLNGVTLIG

SEQ ID NO: 97048 - protein, 21 aa, Severe acute respiratory syndrome coronavirus 2
GLQPSVGPKQASLNGVTLIGE

SEQ ID NO: 97049 - protein, 21 aa, Severe acute respiratory syndrome coronavirus 2
LQPSVGPKQASLNGVTLIGEA

SEQ ID NO: 97050 - protein, 21 aa, Severe acute respiratory syndrome coronavirus 2
KTQFNYYKKVDGVVQQLPETY

SEQ ID NO: 97051 - protein, 21 aa, Severe acute respiratory syndrome coronavirus 2
TQFNYYKKVDGVVQQLPETYF

SEQ ID NO: 97052 - protein, 21 aa, Severe acute respiratory syndrome coronavirus 2
QFNYYKKVDGVVQQLPETYFT

SEQ ID NO: 97053 - protein, 21 aa, Severe acute respiratory syndrome coronavirus 2
FNYYKKVDGVVQQLPETYFTQ

SEQ ID NO: 97054 - protein, 21 aa, Severe acute respiratory syndrome coronavirus 2
NYYKKVDGVVQQLPETYFTQS

SEQ ID NO: 97055 - protein, 21 aa, Severe acute respiratory syndrome coronavirus 2
YYKKVDGVVQQLPETYFTQSR

SEQ ID NO: 97056 - protein, 21 aa, Severe acute respiratory syndrome coronavirus 2
YKKVDGVVQQLPETYFTQSRN

SEQ ID NO: 97057 - protein, 21 aa, Severe acute respiratory syndrome coronavirus 2
KKVDGVVQQLPETYFTQSRNL

SEQ ID NO: 97058 - protein, 21 aa, Severe acute respiratory syndrome coronavirus 2
KVDGVVQQLPETYFTQSRNLQ

SEQ ID NO: 97059 - protein, 21 aa, Severe acute respiratory syndrome coronavirus 2
VDGVVQQLPETYFTQSRNLQE

SEQ ID NO: 97060 - protein, 21 aa, Severe acute respiratory syndrome coronavirus 2
DGVVQQLPETYFTQSRNLQEF

SEQ ID NO: 97061 - protein, 21 aa, Severe acute respiratory syndrome coronavirus 2
GVVQQLPETYFTQSRNLQEFK

SEQ ID NO: 97062 - protein, 21 aa, Severe acute respiratory syndrome coronavirus 2
VVQQLPETYFTQSRNLQEFKP

SEQ ID NO: 97063 - protein, 21 aa, Severe acute respiratory syndrome coronavirus 2
VAKYTQLCQYLNTLTLAVPYN

SEQ ID NO: 97064 - protein, 21 aa, Severe acute respiratory syndrome coronavirus 2
VAPGTAVLRQWLPTGTLLVDS

SEQ ID NO: 97065 - protein, 21 aa, Severe acute respiratory syndrome coronavirus 2
APGTAVLRQWLPTGTLLVDSD

SEQ ID NO: 97066 - protein, 21 aa, Severe acute respiratory syndrome coronavirus 2
PGTAVLRQWLPTGTLLVDSDL

SEQ ID NO: 97067 - protein, 21 aa, Severe acute respiratory syndrome coronavirus 2
GTAVLRQWLPTGTLLVDSDLN

SEQ ID NO: 97068 - protein, 21 aa, Severe acute respiratory syndrome coronavirus 2
TAVLRQWLPTGTLLVDSDLND

SEQ ID NO: 97069 - protein, 21 aa, Severe acute respiratory syndrome coronavirus 2
AVLRQWLPTGTLLVDSDLNDF

SEQ ID NO: 97070 - protein, 21 aa, Severe acute respiratory syndrome coronavirus 2
VLRQWLPTGTLLVDSDLNDFV

SEQ ID NO: 97071 - protein, 21 aa, Severe acute respiratory syndrome coronavirus 2
LRQWLPTGTLLVDSDLNDFVS

SEQ ID NO: 97072 - protein, 21 aa, Severe acute respiratory syndrome coronavirus 2
RQWLPTGTLLVDSDLNDFVSD

SEQ ID NO: 97073 - protein, 21 aa, Severe acute respiratory syndrome coronavirus 2
QWLPTGTLLVDSDLNDFVSDA

SEQ ID NO: 97074 - protein, 21 aa, Severe acute respiratory syndrome coronavirus 2
LSSYSLFDMSKFPLKLRGTAV

SEQ ID NO: 97075 - protein, 21 aa, Severe acute respiratory syndrome coronavirus 2
SSYSLFDMSKFPLKLRGTAVM

SEQ ID NO: 97076 - protein, 21 aa, Severe acute respiratory syndrome coronavirus 2
SYSLFDMSKFPLKLRGTAVMS

SEQ ID NO: 97077 - protein, 21 aa, Severe acute respiratory syndrome coronavirus 2
YSLFDMSKFPLKLRGTAVMSL

SEQ ID NO: 97078 - protein, 21 aa, Severe acute respiratory syndrome coronavirus 2
SLFDMSKFPLKLRGTAVMSLK

SEQ ID NO: 97079 - protein, 21 aa, Severe acute respiratory syndrome coronavirus 2
LFDMSKFPLKLRGTAVMSLKE

SEQ ID NO: 97080 - protein, 21 aa, Severe acute respiratory syndrome coronavirus 2
QINDMILSLLSKGRLIIRENN

SEQ ID NO: 97081 - protein, 21 aa, Severe acute respiratory syndrome coronavirus 2
INDMILSLLSKGRLIIRENNR

SEQ ID NO: 97082 - protein, 22 aa, Severe acute respiratory syndrome coronavirus 2
KHDFFKFRIDGDMVPHISRQRL

SEQ ID NO: 97083 - protein, 22 aa, Severe acute respiratory syndrome coronavirus 2
HDFFKFRIDGDMVPHISRQRLT

SEQ ID NO: 97084 - protein, 22 aa, Severe acute respiratory syndrome coronavirus 2
DFFKFRIDGDMVPHISRQRLTK

SEQ ID NO: 97085 - protein, 22 aa, Severe acute respiratory syndrome coronavirus 2
FFKFRIDGDMVPHISRQRLTKY

SEQ ID NO: 97086 - protein, 22 aa, Severe acute respiratory syndrome coronavirus 2
FKFRIDGDMVPHISRQRLTKYT

SEQ ID NO: 97087 - protein, 22 aa, Severe acute respiratory syndrome coronavirus 2
KFRIDGDMVPHISRQRLTKYTM

SEQ ID NO: 97088 - protein, 22 aa, Severe acute respiratory syndrome coronavirus 2
FRIDGDMVPHISRQRLTKYTMA

SEQ ID NO: 97089 - protein, 22 aa, Severe acute respiratory syndrome coronavirus 2
RIDGDMVPHISRQRLTKYTMAD

SEQ ID NO: 97090 - protein, 22 aa, Severe acute respiratory syndrome coronavirus 2
IDGDMVPHISRQRLTKYTMADL

SEQ ID NO: 97091 - protein, 22 aa, Severe acute respiratory syndrome coronavirus 2
VPHISRQRLTKYTMADLVYALR

SEQ ID NO: 97092 - protein, 22 aa, Severe acute respiratory syndrome coronavirus 2
PHISRQRLTKYTMADLVYALRH

SEQ ID NO: 97093 - protein, 22 aa, Severe acute respiratory syndrome coronavirus 2
HISRQRLTKYTMADLVYALRHF

SEQ ID NO: 97094 - protein, 22 aa, Severe acute respiratory syndrome coronavirus 2
ISRQRLTKYTMADLVYALRHFD

SEQ ID NO: 97095 - protein, 22 aa, Severe acute respiratory syndrome coronavirus 2
SRQRLTKYTMADLVYALRHFDE

SEQ ID NO: 97096 - protein, 22 aa, Severe acute respiratory syndrome coronavirus 2
RQRLTKYTMADLVYALRHFDEG

SEQ ID NO: 97097 - protein, 22 aa, Severe acute respiratory syndrome coronavirus 2
QRLTKYTMADLVYALRHFDEGN

SEQ ID NO: 97098 - protein, 22 aa, Severe acute respiratory syndrome coronavirus 2
RLTKYTMADLVYALRHFDEGNC

SEQ ID NO: 97099 - protein, 22 aa, Severe acute respiratory syndrome coronavirus 2
LTKYTMADLVYALRHFDEGNCD

SEQ ID NO: 97100 - protein, 22 aa, Severe acute respiratory syndrome coronavirus 2
VQFCDAMRNAGIVGVLTLDNQD

SEQ ID NO: 97101 - protein, 22 aa, Severe acute respiratory syndrome coronavirus 2
QFCDAMRNAGIVGVLTLDNQDL

SEQ ID NO: 97102 - protein, 22 aa, Severe acute respiratory syndrome coronavirus 2
FCDAMRNAGIVGVLTLDNQDLN

SEQ ID NO: 97103 - protein, 22 aa, Severe acute respiratory syndrome coronavirus 2
CDAMRNAGIVGVLTLDNQDLNG

SEQ ID NO: 97104 - protein, 22 aa, Severe acute respiratory syndrome coronavirus 2
DAMRNAGIVGVLTLDNQDLNGN

SEQ ID NO: 97105 - protein, 22 aa, Severe acute respiratory syndrome coronavirus 2
AMRNAGIVGVLTLDNQDLNGNW

SEQ ID NO: 97106 - protein, 22 aa, Severe acute respiratory syndrome coronavirus 2
MRNAGIVGVLTLDNQDLNGNWY

SEQ ID NO: 97107 - protein, 22 aa, Severe acute respiratory syndrome coronavirus 2
RNAGIVGVLTLDNQDLNGNWYD

SEQ ID NO: 97108 - protein, 22 aa, Severe acute respiratory syndrome coronavirus 2
NAGIVGVLTLDNQDLNGNWYDF

SEQ ID NO: 97109 - protein, 22 aa, Severe acute respiratory syndrome coronavirus 2
AGIVGVLTLDNQDLNGNWYDFG

SEQ ID NO: 97110 - protein, 22 aa, Severe acute respiratory syndrome coronavirus 2
GIVGVLTLDNQDLNGNWYDFGD

SEQ ID NO: 97111 - protein, 22 aa, Severe acute respiratory syndrome coronavirus 2
ESHVDTDLTKPYIKWDLLKYDF

SEQ ID NO: 97112 - protein, 22 aa, Severe acute respiratory syndrome coronavirus 2
VRKIFVDGVPFVVSTGYHFREL

SEQ ID NO: 97113 - protein, 22 aa, Severe acute respiratory syndrome coronavirus 2
RKIFVDGVPFVVSTGYHFRELG

SEQ ID NO: 97114 - protein, 22 aa, Severe acute respiratory syndrome coronavirus 2
KIFVDGVPFVVSTGYHFRELGV

SEQ ID NO: 97115 - protein, 22 aa, Severe acute respiratory syndrome coronavirus 2
IFVDGVPFVVSTGYHFRELGVV

SEQ ID NO: 97116 - protein, 22 aa, Severe acute respiratory syndrome coronavirus 2
FVDGVPFVVSTGYHFRELGVVH

SEQ ID NO: 97117 - protein, 22 aa, Severe acute respiratory syndrome coronavirus 2
VDGVPFVVSTGYHFRELGVVHN

SEQ ID NO: 97118 - protein, 22 aa, Severe acute respiratory syndrome coronavirus 2
DVNLHSSRLSFKELLVYAADPA

SEQ ID NO: 97119 - protein, 22 aa, Severe acute respiratory syndrome coronavirus 2
ISDYDYYRYNLPTMCDIRQLLF

SEQ ID NO: 97120 - protein, 22 aa, Severe acute respiratory syndrome coronavirus 2
QVIVNNLDKSAGFPFNKWGKAR

SEQ ID NO: 97121 - protein, 22 aa, Severe acute respiratory syndrome coronavirus 2
YTKRNVIPTITQMNLKYAISAK

SEQ ID NO: 97122 - protein, 22 aa, Severe acute respiratory syndrome coronavirus 2
TKRNVIPTITQMNLKYAISAKN

SEQ ID NO: 97123 - protein, 22 aa, Severe acute respiratory syndrome coronavirus 2
KRNVIPTITQMNLKYAISAKNR

SEQ ID NO: 97124 - protein, 22 aa, Severe acute respiratory syndrome coronavirus 2
RNVIPTITQMNLKYAISAKNRA

SEQ ID NO: 97125 - protein, 22 aa, Severe acute respiratory syndrome coronavirus 2
NVIPTITQMNLKYAISAKNRAR

SEQ ID NO: 97126 - protein, 22 aa, Severe acute respiratory syndrome coronavirus 2
VIPTITQMNLKYAISAKNRART

SEQ ID NO: 97127 - protein, 22 aa, Severe acute respiratory syndrome coronavirus 2
IPTITQMNLKYAISAKNRARTV

SEQ ID NO: 97128 - protein, 22 aa, Severe acute respiratory syndrome coronavirus 2
PTITQMNLKYAISAKNRARTVA

SEQ ID NO: 97129 - protein, 22 aa, Severe acute respiratory syndrome coronavirus 2
TITQMNLKYAISAKNRARTVAG

SEQ ID NO: 97130 - protein, 22 aa, Severe acute respiratory syndrome coronavirus 2
ITQMNLKYAISAKNRARTVAGV

SEQ ID NO: 97131 - protein, 22 aa, Severe acute respiratory syndrome coronavirus 2
TQMNLKYAISAKNRARTVAGVS

SEQ ID NO: 97132 - protein, 22 aa, Severe acute respiratory syndrome coronavirus 2
QMNLKYAISAKNRARTVAGVSI

SEQ ID NO: 97133 - protein, 22 aa, Severe acute respiratory syndrome coronavirus 2
MNLKYAISAKNRARTVAGVSIC

SEQ ID NO: 97134 - protein, 22 aa, Severe acute respiratory syndrome coronavirus 2
NLKYAISAKNRARTVAGVSICS

SEQ ID NO: 97135 - protein, 22 aa, Severe acute respiratory syndrome coronavirus 2
LKYAISAKNRARTVAGVSICST

SEQ ID NO: 97136 - protein, 22 aa, Severe acute respiratory syndrome coronavirus 2
KYAISAKNRARTVAGVSICSTM

SEQ ID NO: 97137 - protein, 22 aa, Severe acute respiratory syndrome coronavirus 2
YAISAKNRARTVAGVSICSTMT

SEQ ID NO: 97138 - protein, 22 aa, Severe acute respiratory syndrome coronavirus 2
AISAKNRARTVAGVSICSTMTN

SEQ ID NO: 97139 - protein, 22 aa, Severe acute respiratory syndrome coronavirus 2
ISAKNRARTVAGVSICSTMTNR

SEQ ID NO: 97140 - protein, 22 aa, Severe acute respiratory syndrome coronavirus 2
SAKNRARTVAGVSICSTMTNRQ

SEQ ID NO: 97141 - protein, 22 aa, Severe acute respiratory syndrome coronavirus 2
AKNRARTVAGVSICSTMTNRQF

SEQ ID NO: 97142 - protein, 22 aa, Severe acute respiratory syndrome coronavirus 2
KNRARTVAGVSICSTMTNRQFH

SEQ ID NO: 97143 - protein, 22 aa, Severe acute respiratory syndrome coronavirus 2
NRARTVAGVSICSTMTNRQFHQ

SEQ ID NO: 97144 - protein, 22 aa, Severe acute respiratory syndrome coronavirus 2
RARTVAGVSICSTMTNRQFHQK

SEQ ID NO: 97145 - protein, 22 aa, Severe acute respiratory syndrome coronavirus 2
ARTVAGVSICSTMTNRQFHQKL

SEQ ID NO: 97146 - protein, 22 aa, Severe acute respiratory syndrome coronavirus 2
RTVAGVSICSTMTNRQFHQKLL

SEQ ID NO: 97147 - protein, 22 aa, Severe acute respiratory syndrome coronavirus 2
TVAGVSICSTMTNRQFHQKLLK

SEQ ID NO: 97148 - protein, 22 aa, Severe acute respiratory syndrome coronavirus 2
VAGVSICSTMTNRQFHQKLLKS

SEQ ID NO: 97149 - protein, 22 aa, Severe acute respiratory syndrome coronavirus 2
AGVSICSTMTNRQFHQKLLKSI

SEQ ID NO: 97150 - protein, 22 aa, Severe acute respiratory syndrome coronavirus 2
GVSICSTMTNRQFHQKLLKSIA

SEQ ID NO: 97151 - protein, 22 aa, Severe acute respiratory syndrome coronavirus 2
VSICSTMTNRQFHQKLLKSIAA

SEQ ID NO: 97152 - protein, 22 aa, Severe acute respiratory syndrome coronavirus 2
SICSTMTNRQFHQKLLKSIAAT

SEQ ID NO: 97153 - protein, 22 aa, Severe acute respiratory syndrome coronavirus 2
ICSTMTNRQFHQKLLKSIAATR

SEQ ID NO: 97154 - protein, 22 aa, Severe acute respiratory syndrome coronavirus 2
CSTMTNRQFHQKLLKSIAATRG

SEQ ID NO: 97155 - protein, 22 aa, Severe acute respiratory syndrome coronavirus 2
STMTNRQFHQKLLKSIAATRGA

SEQ ID NO: 97156 - protein, 22 aa, Severe acute respiratory syndrome coronavirus 2
TMTNRQFHQKLLKSIAATRGAT

SEQ ID NO: 97157 - protein, 22 aa, Severe acute respiratory syndrome coronavirus 2
CGGSLYVKPGGTSSGDATTAYA

SEQ ID NO: 97158 - protein, 22 aa, Severe acute respiratory syndrome coronavirus 2
GGSLYVKPGGTSSGDATTAYAN

SEQ ID NO: 97159 - protein, 22 aa, Severe acute respiratory syndrome coronavirus 2
GSLYVKPGGTSSGDATTAYANS

SEQ ID NO: 97160 - protein, 22 aa, Severe acute respiratory syndrome coronavirus 2
SLYVKPGGTSSGDATTAYANSV

SEQ ID NO: 97161 - protein, 22 aa, Severe acute respiratory syndrome coronavirus 2
LYVKPGGTSSGDATTAYANSVF

SEQ ID NO: 97162 - protein, 22 aa, Severe acute respiratory syndrome coronavirus 2
YVKPGGTSSGDATTAYANSVFN

SEQ ID NO: 97163 - protein, 22 aa, Severe acute respiratory syndrome coronavirus 2
VKPGGTSSGDATTAYANSVFNI

SEQ ID NO: 97164 - protein, 22 aa, Severe acute respiratory syndrome coronavirus 2
KPGGTSSGDATTAYANSVFNIC

SEQ ID NO: 97165 - protein, 22 aa, Severe acute respiratory syndrome coronavirus 2
PGGTSSGDATTAYANSVFNICQ

SEQ ID NO: 97166 - protein, 22 aa, Severe acute respiratory syndrome coronavirus 2
GGTSSGDATTAYANSVFNICQA

SEQ ID NO: 97167 - protein, 22 aa, Severe acute respiratory syndrome coronavirus 2
GTSSGDATTAYANSVFNICQAV

SEQ ID NO: 97168 - protein, 22 aa, Severe acute respiratory syndrome coronavirus 2
TSSGDATTAYANSVFNICQAVT

SEQ ID NO: 97169 - protein, 22 aa, Severe acute respiratory syndrome coronavirus 2
SSGDATTAYANSVFNICQAVTA

SEQ ID NO: 97170 - protein, 22 aa, Severe acute respiratory syndrome coronavirus 2
SGDATTAYANSVFNICQAVTAN

SEQ ID NO: 97171 - protein, 22 aa, Severe acute respiratory syndrome coronavirus 2
GDATTAYANSVFNICQAVTANV

SEQ ID NO: 97172 - protein, 22 aa, Severe acute respiratory syndrome coronavirus 2
DATTAYANSVFNICQAVTANVN

SEQ ID NO: 97173 - protein, 22 aa, Severe acute respiratory syndrome coronavirus 2
ATTAYANSVFNICQAVTANVNA

SEQ ID NO: 97174 - protein, 22 aa, Severe acute respiratory syndrome coronavirus 2
TTAYANSVFNICQAVTANVNAL

SEQ ID NO: 97175 - protein, 22 aa, Severe acute respiratory syndrome coronavirus 2
TAYANSVFNICQAVTANVNALL

SEQ ID NO: 97176 - protein, 22 aa, Severe acute respiratory syndrome coronavirus 2
AYANSVFNICQAVTANVNALLS

SEQ ID NO: 97177 - protein, 22 aa, Severe acute respiratory syndrome coronavirus 2
YANSVFNICQAVTANVNALLST

SEQ ID NO: 97178 - protein, 22 aa, Severe acute respiratory syndrome coronavirus 2
ANSVFNICQAVTANVNALLSTD

SEQ ID NO: 97179 - protein, 22 aa, Severe acute respiratory syndrome coronavirus 2
NSVFNICQAVTANVNALLSTDG

SEQ ID NO: 97180 - protein, 22 aa, Severe acute respiratory syndrome coronavirus 2
SVFNICQAVTANVNALLSTDGN

SEQ ID NO: 97181 - protein, 22 aa, Severe acute respiratory syndrome coronavirus 2
VFNICQAVTANVNALLSTDGNK

SEQ ID NO: 97182 - protein, 22 aa, Severe acute respiratory syndrome coronavirus 2
FNICQAVTANVNALLSTDGNKI

SEQ ID NO: 97183 - protein, 22 aa, Severe acute respiratory syndrome coronavirus 2
NICQAVTANVNALLSTDGNKIA

SEQ ID NO: 97184 - protein, 22 aa, Severe acute respiratory syndrome coronavirus 2
ICQAVTANVNALLSTDGNKIAD

SEQ ID NO: 97185 - protein, 22 aa, Severe acute respiratory syndrome coronavirus 2
CQAVTANVNALLSTDGNKIADK

SEQ ID NO: 97186 - protein, 22 aa, Severe acute respiratory syndrome coronavirus 2
QAVTANVNALLSTDGNKIADKY

SEQ ID NO: 97187 - protein, 22 aa, Severe acute respiratory syndrome coronavirus 2
AVTANVNALLSTDGNKIADKYV

SEQ ID NO: 97188 - protein, 22 aa, Severe acute respiratory syndrome coronavirus 2
VTANVNALLSTDGNKIADKYVR

SEQ ID NO: 97189 - protein, 22 aa, Severe acute respiratory syndrome coronavirus 2
TANVNALLSTDGNKIADKYVRN

SEQ ID NO: 97190 - protein, 22 aa, Severe acute respiratory syndrome coronavirus 2
ANVNALLSTDGNKIADKYVRNL

SEQ ID NO: 97191 - protein, 22 aa, Severe acute respiratory syndrome coronavirus 2
NVNALLSTDGNKIADKYVRNLQ

SEQ ID NO: 97192 - protein, 22 aa, Severe acute respiratory syndrome coronavirus 2
VNALLSTDGNKIADKYVRNLQH

SEQ ID NO: 97193 - protein, 22 aa, Severe acute respiratory syndrome coronavirus 2
NALLSTDGNKIADKYVRNLQHR

SEQ ID NO: 97194 - protein, 22 aa, Severe acute respiratory syndrome coronavirus 2
ALLSTDGNKIADKYVRNLQHRL

SEQ ID NO: 97195 - protein, 22 aa, Severe acute respiratory syndrome coronavirus 2
LLSTDGNKIADKYVRNLQHRLY

SEQ ID NO: 97196 - protein, 22 aa, Severe acute respiratory syndrome coronavirus 2
LSTDGNKIADKYVRNLQHRLYE

SEQ ID NO: 97197 - protein, 22 aa, Severe acute respiratory syndrome coronavirus 2
STDGNKIADKYVRNLQHRLYEC

SEQ ID NO: 97198 - protein, 22 aa, Severe acute respiratory syndrome coronavirus 2
TDGNKIADKYVRNLQHRLYECL

SEQ ID NO: 97199 - protein, 22 aa, Severe acute respiratory syndrome coronavirus 2
DGNKIADKYVRNLQHRLYECLY

SEQ ID NO: 97200 - protein, 22 aa, Severe acute respiratory syndrome coronavirus 2
GNKIADKYVRNLQHRLYECLYR

SEQ ID NO: 97201 - protein, 22 aa, Severe acute respiratory syndrome coronavirus 2
FYAYLRKHFSMMILSDDAVVCF

SEQ ID NO: 97202 - protein, 22 aa, Severe acute respiratory syndrome coronavirus 2
LVASIKNFKSVLYYQNNVFMSE

SEQ ID NO: 97203 - protein, 22 aa, Severe acute respiratory syndrome coronavirus 2
VASIKNFKSVLYYQNNVFMSEA

SEQ ID NO: 97204 - protein, 22 aa, Severe acute respiratory syndrome coronavirus 2
ASIKNFKSVLYYQNNVFMSEAK

SEQ ID NO: 97205 - protein, 22 aa, Severe acute respiratory syndrome coronavirus 2
SIKNFKSVLYYQNNVFMSEAKC

SEQ ID NO: 97206 - protein, 22 aa, Severe acute respiratory syndrome coronavirus 2
IKNFKSVLYYQNNVFMSEAKCW

SEQ ID NO: 97207 - protein, 22 aa, Severe acute respiratory syndrome coronavirus 2
NFKSVLYYQNNVFMSEAKCWTE

SEQ ID NO: 97208 - protein, 22 aa, Severe acute respiratory syndrome coronavirus 2
FKSVLYYQNNVFMSEAKCWTET

SEQ ID NO: 97209 - protein, 22 aa, Severe acute respiratory syndrome coronavirus 2
KSVLYYQNNVFMSEAKCWTETD

SEQ ID NO: 97210 - protein, 22 aa, Severe acute respiratory syndrome coronavirus 2
SVLYYQNNVFMSEAKCWTETDL

SEQ ID NO: 97211 - protein, 22 aa, Severe acute respiratory syndrome coronavirus 2
PSRILGAGCFVDDIVKTDGTLM

SEQ ID NO: 97212 - protein, 22 aa, Severe acute respiratory syndrome coronavirus 2
SRILGAGCFVDDIVKTDGTLMI

SEQ ID NO: 97213 - protein, 22 aa, Severe acute respiratory syndrome coronavirus 2
RILGAGCFVDDIVKTDGTLMIE

SEQ ID NO: 97214 - protein, 22 aa, Severe acute respiratory syndrome coronavirus 2
ILGAGCFVDDIVKTDGTLMIER

SEQ ID NO: 97215 - protein, 22 aa, Severe acute respiratory syndrome coronavirus 2
LGAGCFVDDIVKTDGTLMIERF

SEQ ID NO: 97216 - protein, 22 aa, Severe acute respiratory syndrome coronavirus 2
GAGCFVDDIVKTDGTLMIERFV

SEQ ID NO: 97217 - protein, 22 aa, Severe acute respiratory syndrome coronavirus 2
AGCFVDDIVKTDGTLMIERFVS

SEQ ID NO: 97218 - protein, 22 aa, Severe acute respiratory syndrome coronavirus 2
GCFVDDIVKTDGTLMIERFVSL

SEQ ID NO: 97219 - protein, 22 aa, Severe acute respiratory syndrome coronavirus 2
CFVDDIVKTDGTLMIERFVSLA

SEQ ID NO: 97220 - protein, 22 aa, Severe acute respiratory syndrome coronavirus 2
FVDDIVKTDGTLMIERFVSLAI

SEQ ID NO: 97221 - protein, 22 aa, Severe acute respiratory syndrome coronavirus 2
VDDIVKTDGTLMIERFVSLAID

SEQ ID NO: 97222 - protein, 22 aa, Severe acute respiratory syndrome coronavirus 2
DDIVKTDGTLMIERFVSLAIDA

SEQ ID NO: 97223 - protein, 22 aa, Severe acute respiratory syndrome coronavirus 2
DIVKTDGTLMIERFVSLAIDAY

SEQ ID NO: 97224 - protein, 22 aa, Severe acute respiratory syndrome coronavirus 2
IVKTDGTLMIERFVSLAIDAYP

SEQ ID NO: 97225 - protein, 22 aa, Severe acute respiratory syndrome coronavirus 2
VTDFNAIATCDWTNAGDYILAN

SEQ ID NO: 97226 - protein, 22 aa, Severe acute respiratory syndrome coronavirus 2
TDFNAIATCDWTNAGDYILANT

SEQ ID NO: 97227 - protein, 22 aa, Severe acute respiratory syndrome coronavirus 2
DFNAIATCDWTNAGDYILANTC

SEQ ID NO: 97228 - protein, 22 aa, Severe acute respiratory syndrome coronavirus 2
EETFKLSYGIATVREVLSDREL

SEQ ID NO: 97229 - protein, 22 aa, Severe acute respiratory syndrome coronavirus 2
VYTACSHAAVDALCEKALKYLP

SEQ ID NO: 97230 - protein, 22 aa, Severe acute respiratory syndrome coronavirus 2
HAAVDALCEKALKYLPIDKCSR

SEQ ID NO: 97231 - protein, 22 aa, Severe acute respiratory syndrome coronavirus 2
AAVDALCEKALKYLPIDKCSRI

SEQ ID NO: 97232 - protein, 22 aa, Severe acute respiratory syndrome coronavirus 2
AVDALCEKALKYLPIDKCSRII

SEQ ID NO: 97233 - protein, 22 aa, Severe acute respiratory syndrome coronavirus 2
VDALCEKALKYLPIDKCSRIIP

SEQ ID NO: 97234 - protein, 22 aa, Severe acute respiratory syndrome coronavirus 2
DALCEKALKYLPIDKCSRIIPA

SEQ ID NO: 97235 - protein, 22 aa, Severe acute respiratory syndrome coronavirus 2
ALCEKALKYLPIDKCSRIIPAR

SEQ ID NO: 97236 - protein, 22 aa, Severe acute respiratory syndrome coronavirus 2
LCEKALKYLPIDKCSRIIPARA

SEQ ID NO: 97237 - protein, 22 aa, Severe acute respiratory syndrome coronavirus 2
CEKALKYLPIDKCSRIIPARAR

SEQ ID NO: 97238 - protein, 22 aa, Severe acute respiratory syndrome coronavirus 2
KALKYLPIDKCSRIIPARARVE

SEQ ID NO: 97239 - protein, 22 aa, Severe acute respiratory syndrome coronavirus 2
ALKYLPIDKCSRIIPARARVEC

SEQ ID NO: 97240 - protein, 22 aa, Severe acute respiratory syndrome coronavirus 2
LKYLPIDKCSRIIPARARVECF

SEQ ID NO: 97241 - protein, 22 aa, Severe acute respiratory syndrome coronavirus 2
KYLPIDKCSRIIPARARVECFD

SEQ ID NO: 97242 - protein, 22 aa, Severe acute respiratory syndrome coronavirus 2
YLPIDKCSRIIPARARVECFDK

SEQ ID NO: 97243 - protein, 22 aa, Severe acute respiratory syndrome coronavirus 2
LPIDKCSRIIPARARVECFDKF

SEQ ID NO: 97244 - protein, 22 aa, Severe acute respiratory syndrome coronavirus 2
PIDKCSRIIPARARVECFDKFK

SEQ ID NO: 97245 - protein, 22 aa, Severe acute respiratory syndrome coronavirus 2
GIPKDMTYRRLISMMGFKMNYQ

SEQ ID NO: 97246 - protein, 22 aa, Severe acute respiratory syndrome coronavirus 2
IPKDMTYRRLISMMGFKMNYQV

SEQ ID NO: 97247 - protein, 22 aa, Severe acute respiratory syndrome coronavirus 2
PKDMTYRRLISMMGFKMNYQVN

SEQ ID NO: 97248 - protein, 22 aa, Severe acute respiratory syndrome coronavirus 2
KDMTYRRLISMMGFKMNYQVNG

SEQ ID NO: 97249 - protein, 22 aa, Severe acute respiratory syndrome coronavirus 2
DMTYRRLISMMGFKMNYQVNGY

SEQ ID NO: 97250 - protein, 22 aa, Severe acute respiratory syndrome coronavirus 2
MTYRRLISMMGFKMNYQVNGYP

SEQ ID NO: 97251 - protein, 22 aa, Severe acute respiratory syndrome coronavirus 2
TYRRLISMMGFKMNYQVNGYPN

SEQ ID NO: 97252 - protein, 22 aa, Severe acute respiratory syndrome coronavirus 2
YRRLISMMGFKMNYQVNGYPNM

SEQ ID NO: 97253 - protein, 22 aa, Severe acute respiratory syndrome coronavirus 2
RRLISMMGFKMNYQVNGYPNMF

SEQ ID NO: 97254 - protein, 22 aa, Severe acute respiratory syndrome coronavirus 2
RLISMMGFKMNYQVNGYPNMFI

SEQ ID NO: 97255 - protein, 22 aa, Severe acute respiratory syndrome coronavirus 2
LISMMGFKMNYQVNGYPNMFIT

SEQ ID NO: 97256 - protein, 22 aa, Severe acute respiratory syndrome coronavirus 2
ISMMGFKMNYQVNGYPNMFITR

SEQ ID NO: 97257 - protein, 22 aa, Severe acute respiratory syndrome coronavirus 2
SMMGFKMNYQVNGYPNMFITRE

SEQ ID NO: 97258 - protein, 22 aa, Severe acute respiratory syndrome coronavirus 2
MMGFKMNYQVNGYPNMFITREE

SEQ ID NO: 97259 - protein, 22 aa, Severe acute respiratory syndrome coronavirus 2
MGFKMNYQVNGYPNMFITREEA

SEQ ID NO: 97260 - protein, 22 aa, Severe acute respiratory syndrome coronavirus 2
GFKMNYQVNGYPNMFITREEAI

SEQ ID NO: 97261 - protein, 22 aa, Severe acute respiratory syndrome coronavirus 2
HVRAWIGFDVEGCHATREAVGT

SEQ ID NO: 97262 - protein, 22 aa, Severe acute respiratory syndrome coronavirus 2
VRAWIGFDVEGCHATREAVGTN

SEQ ID NO: 97263 - protein, 22 aa, Severe acute respiratory syndrome coronavirus 2
SDRVVFVLWAHGFELTSMKYFV

SEQ ID NO: 97264 - protein, 22 aa, Severe acute respiratory syndrome coronavirus 2
DRVVFVLWAHGFELTSMKYFVK

SEQ ID NO: 97265 - protein, 22 aa, Severe acute respiratory syndrome coronavirus 2
RVVFVLWAHGFELTSMKYFVKI

SEQ ID NO: 97266 - protein, 22 aa, Severe acute respiratory syndrome coronavirus 2
VVFVLWAHGFELTSMKYFVKIG

SEQ ID NO: 97267 - protein, 22 aa, Severe acute respiratory syndrome coronavirus 2
VFVLWAHGFELTSMKYFVKIGP

SEQ ID NO: 97268 - protein, 22 aa, Severe acute respiratory syndrome coronavirus 2
FVLWAHGFELTSMKYFVKIGPE

SEQ ID NO: 97269 - protein, 22 aa, Severe acute respiratory syndrome coronavirus 2
VLWAHGFELTSMKYFVKIGPER

SEQ ID NO: 97270 - protein, 22 aa, Severe acute respiratory syndrome coronavirus 2
LWAHGFELTSMKYFVKIGPERT

SEQ ID NO: 97271 - protein, 22 aa, Severe acute respiratory syndrome coronavirus 2
WAHGFELTSMKYFVKIGPERTC

SEQ ID NO: 97272 - protein, 22 aa, Severe acute respiratory syndrome coronavirus 2
AHGFELTSMKYFVKIGPERTCC

SEQ ID NO: 97273 - protein, 22 aa, Severe acute respiratory syndrome coronavirus 2
HGFELTSMKYFVKIGPERTCCL

SEQ ID NO: 97274 - protein, 22 aa, Severe acute respiratory syndrome coronavirus 2
GFELTSMKYFVKIGPERTCCLC

SEQ ID NO: 97275 - protein, 22 aa, Severe acute respiratory syndrome coronavirus 2
FELTSMKYFVKIGPERTCCLCD

SEQ ID NO: 97276 - protein, 22 aa, Severe acute respiratory syndrome coronavirus 2
DKFPVLHDIGNPKAIKCVPQAD

SEQ ID NO: 97277 - protein, 22 aa, Severe acute respiratory syndrome coronavirus 2
KFPVLHDIGNPKAIKCVPQADV

SEQ ID NO: 97278 - protein, 22 aa, Severe acute respiratory syndrome coronavirus 2
GVCLFWNCNVDRYPANSIVCRF

SEQ ID NO: 97279 - protein, 22 aa, Severe acute respiratory syndrome coronavirus 2
VCLFWNCNVDRYPANSIVCRFD

SEQ ID NO: 97280 - protein, 22 aa, Severe acute respiratory syndrome coronavirus 2
CLFWNCNVDRYPANSIVCRFDT

SEQ ID NO: 97281 - protein, 22 aa, Severe acute respiratory syndrome coronavirus 2
LFWNCNVDRYPANSIVCRFDTR

SEQ ID NO: 97282 - protein, 22 aa, Severe acute respiratory syndrome coronavirus 2
FWNCNVDRYPANSIVCRFDTRV

SEQ ID NO: 97283 - protein, 22 aa, Severe acute respiratory syndrome coronavirus 2
WNCNVDRYPANSIVCRFDTRVL

SEQ ID NO: 97284 - protein, 22 aa, Severe acute respiratory syndrome coronavirus 2
NCNVDRYPANSIVCRFDTRVLS

SEQ ID NO: 97285 - protein, 22 aa, Severe acute respiratory syndrome coronavirus 2
CNVDRYPANSIVCRFDTRVLSN

SEQ ID NO: 97286 - protein, 22 aa, Severe acute respiratory syndrome coronavirus 2
NVDRYPANSIVCRFDTRVLSNL

SEQ ID NO: 97287 - protein, 22 aa, Severe acute respiratory syndrome coronavirus 2
VDRYPANSIVCRFDTRVLSNLN

SEQ ID NO: 97288 - protein, 22 aa, Severe acute respiratory syndrome coronavirus 2
DRYPANSIVCRFDTRVLSNLNL

SEQ ID NO: 97289 - protein, 22 aa, Severe acute respiratory syndrome coronavirus 2
DKSAFVNLKQLPFFYYSDSPCE

SEQ ID NO: 97290 - protein, 22 aa, Severe acute respiratory syndrome coronavirus 2
KSAFVNLKQLPFFYYSDSPCES

SEQ ID NO: 97291 - protein, 22 aa, Severe acute respiratory syndrome coronavirus 2
AFVNLKQLPFFYYSDSPCESHG

SEQ ID NO: 97292 - protein, 22 aa, Severe acute respiratory syndrome coronavirus 2
FVNLKQLPFFYYSDSPCESHGK

SEQ ID NO: 97293 - protein, 22 aa, Severe acute respiratory syndrome coronavirus 2
VVSDIDYVPLKSATCITRCNLG

SEQ ID NO: 97294 - protein, 22 aa, Severe acute respiratory syndrome coronavirus 2
ISAGFSLWVYKQFDTYNLWNTF

SEQ ID NO: 97295 - protein, 22 aa, Severe acute respiratory syndrome coronavirus 2
KTTLPVNVAFELWAKRNIKPVP

SEQ ID NO: 97296 - protein, 22 aa, Severe acute respiratory syndrome coronavirus 2
TTLPVNVAFELWAKRNIKPVPE

SEQ ID NO: 97297 - protein, 22 aa, Severe acute respiratory syndrome coronavirus 2
IAANTVIWDYKRDAPAHISTIG

SEQ ID NO: 97298 - protein, 22 aa, Severe acute respiratory syndrome coronavirus 2
AANTVIWDYKRDAPAHISTIGV

SEQ ID NO: 97299 - protein, 22 aa, Severe acute respiratory syndrome coronavirus 2
ANTVIWDYKRDAPAHISTIGVC

SEQ ID NO: 97300 - protein, 22 aa, Severe acute respiratory syndrome coronavirus 2
NTVIWDYKRDAPAHISTIGVCS

SEQ ID NO: 97301 - protein, 22 aa, Severe acute respiratory syndrome coronavirus 2
TVIWDYKRDAPAHISTIGVCSM

SEQ ID NO: 97302 - protein, 22 aa, Severe acute respiratory syndrome coronavirus 2
VIWDYKRDAPAHISTIGVCSMT

SEQ ID NO: 97303 - protein, 22 aa, Severe acute respiratory syndrome coronavirus 2
IWDYKRDAPAHISTIGVCSMTD

SEQ ID NO: 97304 - protein, 22 aa, Severe acute respiratory syndrome coronavirus 2
WDYKRDAPAHISTIGVCSMTDI

SEQ ID NO: 97305 - protein, 22 aa, Severe acute respiratory syndrome coronavirus 2
DYKRDAPAHISTIGVCSMTDIA

SEQ ID NO: 97306 - protein, 22 aa, Severe acute respiratory syndrome coronavirus 2
YKRDAPAHISTIGVCSMTDIAK

SEQ ID NO: 97307 - protein, 22 aa, Severe acute respiratory syndrome coronavirus 2
KRDAPAHISTIGVCSMTDIAKK

SEQ ID NO: 97308 - protein, 22 aa, Severe acute respiratory syndrome coronavirus 2
RDAPAHISTIGVCSMTDIAKKP

SEQ ID NO: 97309 - protein, 22 aa, Severe acute respiratory syndrome coronavirus 2
DAPAHISTIGVCSMTDIAKKPT

SEQ ID NO: 97310 - protein, 22 aa, Severe acute respiratory syndrome coronavirus 2
APAHISTIGVCSMTDIAKKPTE

SEQ ID NO: 97311 - protein, 22 aa, Severe acute respiratory syndrome coronavirus 2
EGSVKGLQPSVGPKQASLNGVT

SEQ ID NO: 97312 - protein, 22 aa, Severe acute respiratory syndrome coronavirus 2
GSVKGLQPSVGPKQASLNGVTL

SEQ ID NO: 97313 - protein, 22 aa, Severe acute respiratory syndrome coronavirus 2
SVKGLQPSVGPKQASLNGVTLI

SEQ ID NO: 97314 - protein, 22 aa, Severe acute respiratory syndrome coronavirus 2
VKGLQPSVGPKQASLNGVTLIG

SEQ ID NO: 97315 - protein, 22 aa, Severe acute respiratory syndrome coronavirus 2
KGLQPSVGPKQASLNGVTLIGE

SEQ ID NO: 97316 - protein, 22 aa, Severe acute respiratory syndrome coronavirus 2
GLQPSVGPKQASLNGVTLIGEA

SEQ ID NO: 97317 - protein, 22 aa, Severe acute respiratory syndrome coronavirus 2
KTQFNYYKKVDGVVQQLPETYF

SEQ ID NO: 97318 - protein, 22 aa, Severe acute respiratory syndrome coronavirus 2
TQFNYYKKVDGVVQQLPETYFT

SEQ ID NO: 97319 - protein, 22 aa, Severe acute respiratory syndrome coronavirus 2
QFNYYKKVDGVVQQLPETYFTQ

SEQ ID NO: 97320 - protein, 22 aa, Severe acute respiratory syndrome coronavirus 2
FNYYKKVDGVVQQLPETYFTQS

SEQ ID NO: 97321 - protein, 22 aa, Severe acute respiratory syndrome coronavirus 2
NYYKKVDGVVQQLPETYFTQSR

SEQ ID NO: 97322 - protein, 22 aa, Severe acute respiratory syndrome coronavirus 2
YYKKVDGVVQQLPETYFTQSRN

SEQ ID NO: 97323 - protein, 22 aa, Severe acute respiratory syndrome coronavirus 2
YKKVDGVVQQLPETYFTQSRNL

SEQ ID NO: 97324 - protein, 22 aa, Severe acute respiratory syndrome coronavirus 2
KKVDGVVQQLPETYFTQSRNLQ

SEQ ID NO: 97325 - protein, 22 aa, Severe acute respiratory syndrome coronavirus 2
KVDGVVQQLPETYFTQSRNLQE

SEQ ID NO: 97326 - protein, 22 aa, Severe acute respiratory syndrome coronavirus 2
VDGVVQQLPETYFTQSRNLQEF

SEQ ID NO: 97327 - protein, 22 aa, Severe acute respiratory syndrome coronavirus 2
DGVVQQLPETYFTQSRNLQEFK

SEQ ID NO: 97328 - protein, 22 aa, Severe acute respiratory syndrome coronavirus 2
GVVQQLPETYFTQSRNLQEFKP

SEQ ID NO: 97329 - protein, 22 aa, Severe acute respiratory syndrome coronavirus 2
VAPGTAVLRQWLPTGTLLVDSD

SEQ ID NO: 97330 - protein, 22 aa, Severe acute respiratory syndrome coronavirus 2
APGTAVLRQWLPTGTLLVDSDL

SEQ ID NO: 97331 - protein, 22 aa, Severe acute respiratory syndrome coronavirus 2
PGTAVLRQWLPTGTLLVDSDLN

SEQ ID NO: 97332 - protein, 22 aa, Severe acute respiratory syndrome coronavirus 2
GTAVLRQWLPTGTLLVDSDLND

SEQ ID NO: 97333 - protein, 22 aa, Severe acute respiratory syndrome coronavirus 2
TAVLRQWLPTGTLLVDSDLNDF

SEQ ID NO: 97334 - protein, 22 aa, Severe acute respiratory syndrome coronavirus 2
AVLRQWLPTGTLLVDSDLNDFV

SEQ ID NO: 97335 - protein, 22 aa, Severe acute respiratory syndrome coronavirus 2
VLRQWLPTGTLLVDSDLNDFVS

SEQ ID NO: 97336 - protein, 22 aa, Severe acute respiratory syndrome coronavirus 2
LRQWLPTGTLLVDSDLNDFVSD

SEQ ID NO: 97337 - protein, 22 aa, Severe acute respiratory syndrome coronavirus 2
RQWLPTGTLLVDSDLNDFVSDA

SEQ ID NO: 97338 - protein, 22 aa, Severe acute respiratory syndrome coronavirus 2
LSSYSLFDMSKFPLKLRGTAVM

SEQ ID NO: 97339 - protein, 22 aa, Severe acute respiratory syndrome coronavirus 2
SSYSLFDMSKFPLKLRGTAVMS

SEQ ID NO: 97340 - protein, 22 aa, Severe acute respiratory syndrome coronavirus 2
SYSLFDMSKFPLKLRGTAVMSL

SEQ ID NO: 97341 - protein, 22 aa, Severe acute respiratory syndrome coronavirus 2
YSLFDMSKFPLKLRGTAVMSLK

SEQ ID NO: 97342 - protein, 22 aa, Severe acute respiratory syndrome coronavirus 2
SLFDMSKFPLKLRGTAVMSLKE

SEQ ID NO: 97343 - protein, 22 aa, Severe acute respiratory syndrome coronavirus 2
QINDMILSLLSKGRLIIRENNR

SEQ ID NO: 97344 - protein, 23 aa, Severe acute respiratory syndrome coronavirus 2
KHDFFKFRIDGDMVPHISRQRLT

SEQ ID NO: 97345 - protein, 23 aa, Severe acute respiratory syndrome coronavirus 2
HDFFKFRIDGDMVPHISRQRLTK

SEQ ID NO: 97346 - protein, 23 aa, Severe acute respiratory syndrome coronavirus 2
DFFKFRIDGDMVPHISRQRLTKY

SEQ ID NO: 97347 - protein, 23 aa, Severe acute respiratory syndrome coronavirus 2
FFKFRIDGDMVPHISRQRLTKYT

SEQ ID NO: 97348 - protein, 23 aa, Severe acute respiratory syndrome coronavirus 2
FKFRIDGDMVPHISRQRLTKYTM

SEQ ID NO: 97349 - protein, 23 aa, Severe acute respiratory syndrome coronavirus 2
KFRIDGDMVPHISRQRLTKYTMA

SEQ ID NO: 97350 - protein, 23 aa, Severe acute respiratory syndrome coronavirus 2
FRIDGDMVPHISRQRLTKYTMAD

SEQ ID NO: 97351 - protein, 23 aa, Severe acute respiratory syndrome coronavirus 2
RIDGDMVPHISRQRLTKYTMADL

SEQ ID NO: 97352 - protein, 23 aa, Severe acute respiratory syndrome coronavirus 2
VPHISRQRLTKYTMADLVYALRH

SEQ ID NO: 97353 - protein, 23 aa, Severe acute respiratory syndrome coronavirus 2
PHISRQRLTKYTMADLVYALRHF

SEQ ID NO: 97354 - protein, 23 aa, Severe acute respiratory syndrome coronavirus 2
HISRQRLTKYTMADLVYALRHFD

SEQ ID NO: 97355 - protein, 23 aa, Severe acute respiratory syndrome coronavirus 2
ISRQRLTKYTMADLVYALRHFDE

SEQ ID NO: 97356 - protein, 23 aa, Severe acute respiratory syndrome coronavirus 2
SRQRLTKYTMADLVYALRHFDEG

SEQ ID NO: 97357 - protein, 23 aa, Severe acute respiratory syndrome coronavirus 2
RQRLTKYTMADLVYALRHFDEGN

SEQ ID NO: 97358 - protein, 23 aa, Severe acute respiratory syndrome coronavirus 2
QRLTKYTMADLVYALRHFDEGNC

SEQ ID NO: 97359 - protein, 23 aa, Severe acute respiratory syndrome coronavirus 2
RLTKYTMADLVYALRHFDEGNCD

SEQ ID NO: 97360 - protein, 23 aa, Severe acute respiratory syndrome coronavirus 2
VQFCDAMRNAGIVGVLTLDNQDL

SEQ ID NO: 97361 - protein, 23 aa, Severe acute respiratory syndrome coronavirus 2
QFCDAMRNAGIVGVLTLDNQDLN

SEQ ID NO: 97362 - protein, 23 aa, Severe acute respiratory syndrome coronavirus 2
FCDAMRNAGIVGVLTLDNQDLNG

SEQ ID NO: 97363 - protein, 23 aa, Severe acute respiratory syndrome coronavirus 2
CDAMRNAGIVGVLTLDNQDLNGN

SEQ ID NO: 97364 - protein, 23 aa, Severe acute respiratory syndrome coronavirus 2
DAMRNAGIVGVLTLDNQDLNGNW

SEQ ID NO: 97365 - protein, 23 aa, Severe acute respiratory syndrome coronavirus 2
AMRNAGIVGVLTLDNQDLNGNWY

SEQ ID NO: 97366 - protein, 23 aa, Severe acute respiratory syndrome coronavirus 2
MRNAGIVGVLTLDNQDLNGNWYD

SEQ ID NO: 97367 - protein, 23 aa, Severe acute respiratory syndrome coronavirus 2
RNAGIVGVLTLDNQDLNGNWYDF

SEQ ID NO: 97368 - protein, 23 aa, Severe acute respiratory syndrome coronavirus 2
NAGIVGVLTLDNQDLNGNWYDFG

SEQ ID NO: 97369 - protein, 23 aa, Severe acute respiratory syndrome coronavirus 2
AGIVGVLTLDNQDLNGNWYDFGD

SEQ ID NO: 97370 - protein, 23 aa, Severe acute respiratory syndrome coronavirus 2
VRKIFVDGVPFVVSTGYHFRELG

SEQ ID NO: 97371 - protein, 23 aa, Severe acute respiratory syndrome coronavirus 2
RKIFVDGVPFVVSTGYHFRELGV

SEQ ID NO: 97372 - protein, 23 aa, Severe acute respiratory syndrome coronavirus 2
KIFVDGVPFVVSTGYHFRELGVV

SEQ ID NO: 97373 - protein, 23 aa, Severe acute respiratory syndrome coronavirus 2
IFVDGVPFVVSTGYHFRELGVVH

SEQ ID NO: 97374 - protein, 23 aa, Severe acute respiratory syndrome coronavirus 2
FVDGVPFVVSTGYHFRELGVVHN

SEQ ID NO: 97375 - protein, 23 aa, Severe acute respiratory syndrome coronavirus 2
YTKRNVIPTITQMNLKYAISAKN

SEQ ID NO: 97376 - protein, 23 aa, Severe acute respiratory syndrome coronavirus 2
TKRNVIPTITQMNLKYAISAKNR

SEQ ID NO: 97377 - protein, 23 aa, Severe acute respiratory syndrome coronavirus 2
KRNVIPTITQMNLKYAISAKNRA

SEQ ID NO: 97378 - protein, 23 aa, Severe acute respiratory syndrome coronavirus 2
RNVIPTITQMNLKYAISAKNRAR

SEQ ID NO: 97379 - protein, 23 aa, Severe acute respiratory syndrome coronavirus 2
NVIPTITQMNLKYAISAKNRART

SEQ ID NO: 97380 - protein, 23 aa, Severe acute respiratory syndrome coronavirus 2
VIPTITQMNLKYAISAKNRARTV

SEQ ID NO: 97381 - protein, 23 aa, Severe acute respiratory syndrome coronavirus 2
IPTITQMNLKYAISAKNRARTVA

SEQ ID NO: 97382 - protein, 23 aa, Severe acute respiratory syndrome coronavirus 2
PTITQMNLKYAISAKNRARTVAG

SEQ ID NO: 97383 - protein, 23 aa, Severe acute respiratory syndrome coronavirus 2
TITQMNLKYAISAKNRARTVAGV

SEQ ID NO: 97384 - protein, 23 aa, Severe acute respiratory syndrome coronavirus 2
ITQMNLKYAISAKNRARTVAGVS

SEQ ID NO: 97385 - protein, 23 aa, Severe acute respiratory syndrome coronavirus 2
TQMNLKYAISAKNRARTVAGVSI

SEQ ID NO: 97386 - protein, 23 aa, Severe acute respiratory syndrome coronavirus 2
QMNLKYAISAKNRARTVAGVSIC

SEQ ID NO: 97387 - protein, 23 aa, Severe acute respiratory syndrome coronavirus 2
MNLKYAISAKNRARTVAGVSICS

SEQ ID NO: 97388 - protein, 23 aa, Severe acute respiratory syndrome coronavirus 2
NLKYAISAKNRARTVAGVSICST

SEQ ID NO: 97389 - protein, 23 aa, Severe acute respiratory syndrome coronavirus 2
LKYAISAKNRARTVAGVSICSTM

SEQ ID NO: 97390 - protein, 23 aa, Severe acute respiratory syndrome coronavirus 2
KYAISAKNRARTVAGVSICSTMT

SEQ ID NO: 97391 - protein, 23 aa, Severe acute respiratory syndrome coronavirus 2
YAISAKNRARTVAGVSICSTMTN

SEQ ID NO: 97392 - protein, 23 aa, Severe acute respiratory syndrome coronavirus 2
AISAKNRARTVAGVSICSTMTNR

SEQ ID NO: 97393 - protein, 23 aa, Severe acute respiratory syndrome coronavirus 2
ISAKNRARTVAGVSICSTMTNRQ

SEQ ID NO: 97394 - protein, 23 aa, Severe acute respiratory syndrome coronavirus 2
SAKNRARTVAGVSICSTMTNRQF

SEQ ID NO: 97395 - protein, 23 aa, Severe acute respiratory syndrome coronavirus 2
AKNRARTVAGVSICSTMTNRQFH

SEQ ID NO: 97396 - protein, 23 aa, Severe acute respiratory syndrome coronavirus 2
KNRARTVAGVSICSTMTNRQFHQ

SEQ ID NO: 97397 - protein, 23 aa, Severe acute respiratory syndrome coronavirus 2
NRARTVAGVSICSTMTNRQFHQK

SEQ ID NO: 97398 - protein, 23 aa, Severe acute respiratory syndrome coronavirus 2
RARTVAGVSICSTMTNRQFHQKL

SEQ ID NO: 97399 - protein, 23 aa, Severe acute respiratory syndrome coronavirus 2
ARTVAGVSICSTMTNRQFHQKLL

SEQ ID NO: 97400 - protein, 23 aa, Severe acute respiratory syndrome coronavirus 2
RTVAGVSICSTMTNRQFHQKLLK

SEQ ID NO: 97401 - protein, 23 aa, Severe acute respiratory syndrome coronavirus 2
TVAGVSICSTMTNRQFHQKLLKS

SEQ ID NO: 97402 - protein, 23 aa, Severe acute respiratory syndrome coronavirus 2
VAGVSICSTMTNRQFHQKLLKSI

SEQ ID NO: 97403 - protein, 23 aa, Severe acute respiratory syndrome coronavirus 2
AGVSICSTMTNRQFHQKLLKSIA

SEQ ID NO: 97404 - protein, 23 aa, Severe acute respiratory syndrome coronavirus 2
GVSICSTMTNRQFHQKLLKSIAA

SEQ ID NO: 97405 - protein, 23 aa, Severe acute respiratory syndrome coronavirus 2
VSICSTMTNRQFHQKLLKSIAAT

SEQ ID NO: 97406 - protein, 23 aa, Severe acute respiratory syndrome coronavirus 2
SICSTMTNRQFHQKLLKSIAATR

SEQ ID NO: 97407 - protein, 23 aa, Severe acute respiratory syndrome coronavirus 2
ICSTMTNRQFHQKLLKSIAATRG

SEQ ID NO: 97408 - protein, 23 aa, Severe acute respiratory syndrome coronavirus 2
CSTMTNRQFHQKLLKSIAATRGA

SEQ ID NO: 97409 - protein, 23 aa, Severe acute respiratory syndrome coronavirus 2
STMTNRQFHQKLLKSIAATRGAT

SEQ ID NO: 97410 - protein, 23 aa, Severe acute respiratory syndrome coronavirus 2
CGGSLYVKPGGTSSGDATTAYAN

SEQ ID NO: 97411 - protein, 23 aa, Severe acute respiratory syndrome coronavirus 2
GGSLYVKPGGTSSGDATTAYANS

SEQ ID NO: 97412 - protein, 23 aa, Severe acute respiratory syndrome coronavirus 2
GSLYVKPGGTSSGDATTAYANSV

SEQ ID NO: 97413 - protein, 23 aa, Severe acute respiratory syndrome coronavirus 2
SLYVKPGGTSSGDATTAYANSVF

SEQ ID NO: 97414 - protein, 23 aa, Severe acute respiratory syndrome coronavirus 2
LYVKPGGTSSGDATTAYANSVFN

SEQ ID NO: 97415 - protein, 23 aa, Severe acute respiratory syndrome coronavirus 2
YVKPGGTSSGDATTAYANSVFNI

SEQ ID NO: 97416 - protein, 23 aa, Severe acute respiratory syndrome coronavirus 2
VKPGGTSSGDATTAYANSVFNIC

SEQ ID NO: 97417 - protein, 23 aa, Severe acute respiratory syndrome coronavirus 2
KPGGTSSGDATTAYANSVFNICQ

SEQ ID NO: 97418 - protein, 23 aa, Severe acute respiratory syndrome coronavirus 2
PGGTSSGDATTAYANSVFNICQA

SEQ ID NO: 97419 - protein, 23 aa, Severe acute respiratory syndrome coronavirus 2
GGTSSGDATTAYANSVFNICQAV

SEQ ID NO: 97420 - protein, 23 aa, Severe acute respiratory syndrome coronavirus 2
GTSSGDATTAYANSVFNICQAVT

SEQ ID NO: 97421 - protein, 23 aa, Severe acute respiratory syndrome coronavirus 2
TSSGDATTAYANSVFNICQAVTA

SEQ ID NO: 97422 - protein, 23 aa, Severe acute respiratory syndrome coronavirus 2
SSGDATTAYANSVFNICQAVTAN

SEQ ID NO: 97423 - protein, 23 aa, Severe acute respiratory syndrome coronavirus 2
SGDATTAYANSVFNICQAVTANV

SEQ ID NO: 97424 - protein, 23 aa, Severe acute respiratory syndrome coronavirus 2
GDATTAYANSVFNICQAVTANVN

SEQ ID NO: 97425 - protein, 23 aa, Severe acute respiratory syndrome coronavirus 2
DATTAYANSVFNICQAVTANVNA

SEQ ID NO: 97426 - protein, 23 aa, Severe acute respiratory syndrome coronavirus 2
ATTAYANSVFNICQAVTANVNAL

SEQ ID NO: 97427 - protein, 23 aa, Severe acute respiratory syndrome coronavirus 2
TTAYANSVFNICQAVTANVNALL

SEQ ID NO: 97428 - protein, 23 aa, Severe acute respiratory syndrome coronavirus 2
TAYANSVFNICQAVTANVNALLS

SEQ ID NO: 97429 - protein, 23 aa, Severe acute respiratory syndrome coronavirus 2
AYANSVFNICQAVTANVNALLST

SEQ ID NO: 97430 - protein, 23 aa, Severe acute respiratory syndrome coronavirus 2
YANSVFNICQAVTANVNALLSTD

SEQ ID NO: 97431 - protein, 23 aa, Severe acute respiratory syndrome coronavirus 2
ANSVFNICQAVTANVNALLSTDG

SEQ ID NO: 97432 - protein, 23 aa, Severe acute respiratory syndrome coronavirus 2
NSVFNICQAVTANVNALLSTDGN

SEQ ID NO: 97433 - protein, 23 aa, Severe acute respiratory syndrome coronavirus 2
SVFNICQAVTANVNALLSTDGNK

SEQ ID NO: 97434 - protein, 23 aa, Severe acute respiratory syndrome coronavirus 2
VFNICQAVTANVNALLSTDGNKI

SEQ ID NO: 97435 - protein, 23 aa, Severe acute respiratory syndrome coronavirus 2
FNICQAVTANVNALLSTDGNKIA

SEQ ID NO: 97436 - protein, 23 aa, Severe acute respiratory syndrome coronavirus 2
NICQAVTANVNALLSTDGNKIAD

SEQ ID NO: 97437 - protein, 23 aa, Severe acute respiratory syndrome coronavirus 2
ICQAVTANVNALLSTDGNKIADK

SEQ ID NO: 97438 - protein, 23 aa, Severe acute respiratory syndrome coronavirus 2
CQAVTANVNALLSTDGNKIADKY

SEQ ID NO: 97439 - protein, 23 aa, Severe acute respiratory syndrome coronavirus 2
QAVTANVNALLSTDGNKIADKYV

SEQ ID NO: 97440 - protein, 23 aa, Severe acute respiratory syndrome coronavirus 2
AVTANVNALLSTDGNKIADKYVR

SEQ ID NO: 97441 - protein, 23 aa, Severe acute respiratory syndrome coronavirus 2
VTANVNALLSTDGNKIADKYVRN

SEQ ID NO: 97442 - protein, 23 aa, Severe acute respiratory syndrome coronavirus 2
TANVNALLSTDGNKIADKYVRNL

SEQ ID NO: 97443 - protein, 23 aa, Severe acute respiratory syndrome coronavirus 2
ANVNALLSTDGNKIADKYVRNLQ

SEQ ID NO: 97444 - protein, 23 aa, Severe acute respiratory syndrome coronavirus 2
NVNALLSTDGNKIADKYVRNLQH

SEQ ID NO: 97445 - protein, 23 aa, Severe acute respiratory syndrome coronavirus 2
VNALLSTDGNKIADKYVRNLQHR

SEQ ID NO: 97446 - protein, 23 aa, Severe acute respiratory syndrome coronavirus 2
NALLSTDGNKIADKYVRNLQHRL

SEQ ID NO: 97447 - protein, 23 aa, Severe acute respiratory syndrome coronavirus 2
ALLSTDGNKIADKYVRNLQHRLY

SEQ ID NO: 97448 - protein, 23 aa, Severe acute respiratory syndrome coronavirus 2
LLSTDGNKIADKYVRNLQHRLYE

SEQ ID NO: 97449 - protein, 23 aa, Severe acute respiratory syndrome coronavirus 2
LSTDGNKIADKYVRNLQHRLYEC

SEQ ID NO: 97450 - protein, 23 aa, Severe acute respiratory syndrome coronavirus 2
STDGNKIADKYVRNLQHRLYECL

SEQ ID NO: 97451 - protein, 23 aa, Severe acute respiratory syndrome coronavirus 2
TDGNKIADKYVRNLQHRLYECLY

SEQ ID NO: 97452 - protein, 23 aa, Severe acute respiratory syndrome coronavirus 2
DGNKIADKYVRNLQHRLYECLYR

SEQ ID NO: 97453 - protein, 23 aa, Severe acute respiratory syndrome coronavirus 2
LVASIKNFKSVLYYQNNVFMSEA

SEQ ID NO: 97454 - protein, 23 aa, Severe acute respiratory syndrome coronavirus 2
VASIKNFKSVLYYQNNVFMSEAK

SEQ ID NO: 97455 - protein, 23 aa, Severe acute respiratory syndrome coronavirus 2
ASIKNFKSVLYYQNNVFMSEAKC

SEQ ID NO: 97456 - protein, 23 aa, Severe acute respiratory syndrome coronavirus 2
SIKNFKSVLYYQNNVFMSEAKCW

SEQ ID NO: 97457 - protein, 23 aa, Severe acute respiratory syndrome coronavirus 2
NFKSVLYYQNNVFMSEAKCWTET

SEQ ID NO: 97458 - protein, 23 aa, Severe acute respiratory syndrome coronavirus 2
FKSVLYYQNNVFMSEAKCWTETD

SEQ ID NO: 97459 - protein, 23 aa, Severe acute respiratory syndrome coronavirus 2
KSVLYYQNNVFMSEAKCWTETDL

SEQ ID NO: 97460 - protein, 23 aa, Severe acute respiratory syndrome coronavirus 2
PSRILGAGCFVDDIVKTDGTLMI

SEQ ID NO: 97461 - protein, 23 aa, Severe acute respiratory syndrome coronavirus 2
SRILGAGCFVDDIVKTDGTLMIE

SEQ ID NO: 97462 - protein, 23 aa, Severe acute respiratory syndrome coronavirus 2
RILGAGCFVDDIVKTDGTLMIER

SEQ ID NO: 97463 - protein, 23 aa, Severe acute respiratory syndrome coronavirus 2
ILGAGCFVDDIVKTDGTLMIERF

SEQ ID NO: 97464 - protein, 23 aa, Severe acute respiratory syndrome coronavirus 2
LGAGCFVDDIVKTDGTLMIERFV

SEQ ID NO: 97465 - protein, 23 aa, Severe acute respiratory syndrome coronavirus 2
GAGCFVDDIVKTDGTLMIERFVS

SEQ ID NO: 97466 - protein, 23 aa, Severe acute respiratory syndrome coronavirus 2
AGCFVDDIVKTDGTLMIERFVSL

SEQ ID NO: 97467 - protein, 23 aa, Severe acute respiratory syndrome coronavirus 2
GCFVDDIVKTDGTLMIERFVSLA

SEQ ID NO: 97468 - protein, 23 aa, Severe acute respiratory syndrome coronavirus 2
CFVDDIVKTDGTLMIERFVSLAI

SEQ ID NO: 97469 - protein, 23 aa, Severe acute respiratory syndrome coronavirus 2
FVDDIVKTDGTLMIERFVSLAID

SEQ ID NO: 97470 - protein, 23 aa, Severe acute respiratory syndrome coronavirus 2
VDDIVKTDGTLMIERFVSLAIDA

SEQ ID NO: 97471 - protein, 23 aa, Severe acute respiratory syndrome coronavirus 2
DDIVKTDGTLMIERFVSLAIDAY

SEQ ID NO: 97472 - protein, 23 aa, Severe acute respiratory syndrome coronavirus 2
DIVKTDGTLMIERFVSLAIDAYP

SEQ ID NO: 97473 - protein, 23 aa, Severe acute respiratory syndrome coronavirus 2
VTDFNAIATCDWTNAGDYILANT

SEQ ID NO: 97474 - protein, 23 aa, Severe acute respiratory syndrome coronavirus 2
TDFNAIATCDWTNAGDYILANTC

SEQ ID NO: 97475 - protein, 23 aa, Severe acute respiratory syndrome coronavirus 2
HAAVDALCEKALKYLPIDKCSRI

SEQ ID NO: 97476 - protein, 23 aa, Severe acute respiratory syndrome coronavirus 2
AAVDALCEKALKYLPIDKCSRII

SEQ ID NO: 97477 - protein, 23 aa, Severe acute respiratory syndrome coronavirus 2
AVDALCEKALKYLPIDKCSRIIP

SEQ ID NO: 97478 - protein, 23 aa, Severe acute respiratory syndrome coronavirus 2
VDALCEKALKYLPIDKCSRIIPA

SEQ ID NO: 97479 - protein, 23 aa, Severe acute respiratory syndrome coronavirus 2
DALCEKALKYLPIDKCSRIIPAR

SEQ ID NO: 97480 - protein, 23 aa, Severe acute respiratory syndrome coronavirus 2
ALCEKALKYLPIDKCSRIIPARA

SEQ ID NO: 97481 - protein, 23 aa, Severe acute respiratory syndrome coronavirus 2
LCEKALKYLPIDKCSRIIPARAR

SEQ ID NO: 97482 - protein, 23 aa, Severe acute respiratory syndrome coronavirus 2
KALKYLPIDKCSRIIPARARVEC

SEQ ID NO: 97483 - protein, 23 aa, Severe acute respiratory syndrome coronavirus 2
ALKYLPIDKCSRIIPARARVECF

SEQ ID NO: 97484 - protein, 23 aa, Severe acute respiratory syndrome coronavirus 2
LKYLPIDKCSRIIPARARVECFD

SEQ ID NO: 97485 - protein, 23 aa, Severe acute respiratory syndrome coronavirus 2
KYLPIDKCSRIIPARARVECFDK

SEQ ID NO: 97486 - protein, 23 aa, Severe acute respiratory syndrome coronavirus 2
YLPIDKCSRIIPARARVECFDKF

SEQ ID NO: 97487 - protein, 23 aa, Severe acute respiratory syndrome coronavirus 2
LPIDKCSRIIPARARVECFDKFK

SEQ ID NO: 97488 - protein, 23 aa, Severe acute respiratory syndrome coronavirus 2
GIPKDMTYRRLISMMGFKMNYQV

SEQ ID NO: 97489 - protein, 23 aa, Severe acute respiratory syndrome coronavirus 2
IPKDMTYRRLISMMGFKMNYQVN

SEQ ID NO: 97490 - protein, 23 aa, Severe acute respiratory syndrome coronavirus 2
PKDMTYRRLISMMGFKMNYQVNG

SEQ ID NO: 97491 - protein, 23 aa, Severe acute respiratory syndrome coronavirus 2
KDMTYRRLISMMGFKMNYQVNGY

SEQ ID NO: 97492 - protein, 23 aa, Severe acute respiratory syndrome coronavirus 2
DMTYRRLISMMGFKMNYQVNGYP

SEQ ID NO: 97493 - protein, 23 aa, Severe acute respiratory syndrome coronavirus 2
MTYRRLISMMGFKMNYQVNGYPN

SEQ ID NO: 97494 - protein, 23 aa, Severe acute respiratory syndrome coronavirus 2
TYRRLISMMGFKMNYQVNGYPNM

SEQ ID NO: 97495 - protein, 23 aa, Severe acute respiratory syndrome coronavirus 2
YRRLISMMGFKMNYQVNGYPNMF

SEQ ID NO: 97496 - protein, 23 aa, Severe acute respiratory syndrome coronavirus 2
RRLISMMGFKMNYQVNGYPNMFI

SEQ ID NO: 97497 - protein, 23 aa, Severe acute respiratory syndrome coronavirus 2
RLISMMGFKMNYQVNGYPNMFIT

SEQ ID NO: 97498 - protein, 23 aa, Severe acute respiratory syndrome coronavirus 2
LISMMGFKMNYQVNGYPNMFITR

SEQ ID NO: 97499 - protein, 23 aa, Severe acute respiratory syndrome coronavirus 2
ISMMGFKMNYQVNGYPNMFITRE

SEQ ID NO: 97500 - protein, 23 aa, Severe acute respiratory syndrome coronavirus 2
SMMGFKMNYQVNGYPNMFITREE

SEQ ID NO: 97501 - protein, 23 aa, Severe acute respiratory syndrome coronavirus 2
MMGFKMNYQVNGYPNMFITREEA

SEQ ID NO: 97502 - protein, 23 aa, Severe acute respiratory syndrome coronavirus 2
MGFKMNYQVNGYPNMFITREEAI

SEQ ID NO: 97503 - protein, 23 aa, Severe acute respiratory syndrome coronavirus 2
HVRAWIGFDVEGCHATREAVGTN

SEQ ID NO: 97504 - protein, 23 aa, Severe acute respiratory syndrome coronavirus 2
VRAWIGFDVEGCHATREAVGTNL

SEQ ID NO: 97505 - protein, 23 aa, Severe acute respiratory syndrome coronavirus 2
SDRVVFVLWAHGFELTSMKYFVK

SEQ ID NO: 97506 - protein, 23 aa, Severe acute respiratory syndrome coronavirus 2
DRVVFVLWAHGFELTSMKYFVKI

SEQ ID NO: 97507 - protein, 23 aa, Severe acute respiratory syndrome coronavirus 2
RVVFVLWAHGFELTSMKYFVKIG

SEQ ID NO: 97508 - protein, 23 aa, Severe acute respiratory syndrome coronavirus 2
VVFVLWAHGFELTSMKYFVKIGP

SEQ ID NO: 97509 - protein, 23 aa, Severe acute respiratory syndrome coronavirus 2
VFVLWAHGFELTSMKYFVKIGPE

SEQ ID NO: 97510 - protein, 23 aa, Severe acute respiratory syndrome coronavirus 2
FVLWAHGFELTSMKYFVKIGPER

SEQ ID NO: 97511 - protein, 23 aa, Severe acute respiratory syndrome coronavirus 2
VLWAHGFELTSMKYFVKIGPERT

SEQ ID NO: 97512 - protein, 23 aa, Severe acute respiratory syndrome coronavirus 2
LWAHGFELTSMKYFVKIGPERTC

SEQ ID NO: 97513 - protein, 23 aa, Severe acute respiratory syndrome coronavirus 2
WAHGFELTSMKYFVKIGPERTCC

SEQ ID NO: 97514 - protein, 23 aa, Severe acute respiratory syndrome coronavirus 2
AHGFELTSMKYFVKIGPERTCCL

SEQ ID NO: 97515 - protein, 23 aa, Severe acute respiratory syndrome coronavirus 2
HGFELTSMKYFVKIGPERTCCLC

SEQ ID NO: 97516 - protein, 23 aa, Severe acute respiratory syndrome coronavirus 2
GFELTSMKYFVKIGPERTCCLCD

SEQ ID NO: 97517 - protein, 23 aa, Severe acute respiratory syndrome coronavirus 2
DKFPVLHDIGNPKAIKCVPQADV

SEQ ID NO: 97518 - protein, 23 aa, Severe acute respiratory syndrome coronavirus 2
KFPVLHDIGNPKAIKCVPQADVE

SEQ ID NO: 97519 - protein, 23 aa, Severe acute respiratory syndrome coronavirus 2
FPVLHDIGNPKAIKCVPQADVEW

SEQ ID NO: 97520 - protein, 23 aa, Severe acute respiratory syndrome coronavirus 2
GVCLFWNCNVDRYPANSIVCRFD

SEQ ID NO: 97521 - protein, 23 aa, Severe acute respiratory syndrome coronavirus 2
VCLFWNCNVDRYPANSIVCRFDT

SEQ ID NO: 97522 - protein, 23 aa, Severe acute respiratory syndrome coronavirus 2
CLFWNCNVDRYPANSIVCRFDTR

SEQ ID NO: 97523 - protein, 23 aa, Severe acute respiratory syndrome coronavirus 2
LFWNCNVDRYPANSIVCRFDTRV

SEQ ID NO: 97524 - protein, 23 aa, Severe acute respiratory syndrome coronavirus 2
FWNCNVDRYPANSIVCRFDTRVL

SEQ ID NO: 97525 - protein, 23 aa, Severe acute respiratory syndrome coronavirus 2
WNCNVDRYPANSIVCRFDTRVLS

SEQ ID NO: 97526 - protein, 23 aa, Severe acute respiratory syndrome coronavirus 2
NCNVDRYPANSIVCRFDTRVLSN

SEQ ID NO: 97527 - protein, 23 aa, Severe acute respiratory syndrome coronavirus 2
CNVDRYPANSIVCRFDTRVLSNL

SEQ ID NO: 97528 - protein, 23 aa, Severe acute respiratory syndrome coronavirus 2
NVDRYPANSIVCRFDTRVLSNLN

SEQ ID NO: 97529 - protein, 23 aa, Severe acute respiratory syndrome coronavirus 2
VDRYPANSIVCRFDTRVLSNLNL

SEQ ID NO: 97530 - protein, 23 aa, Severe acute respiratory syndrome coronavirus 2
DKSAFVNLKQLPFFYYSDSPCES

SEQ ID NO: 97531 - protein, 23 aa, Severe acute respiratory syndrome coronavirus 2
AFVNLKQLPFFYYSDSPCESHGK

SEQ ID NO: 97532 - protein, 23 aa, Severe acute respiratory syndrome coronavirus 2
KTTLPVNVAFELWAKRNIKPVPE

SEQ ID NO: 97533 - protein, 23 aa, Severe acute respiratory syndrome coronavirus 2
IAANTVIWDYKRDAPAHISTIGV

SEQ ID NO: 97534 - protein, 23 aa, Severe acute respiratory syndrome coronavirus 2
AANTVIWDYKRDAPAHISTIGVC

SEQ ID NO: 97535 - protein, 23 aa, Severe acute respiratory syndrome coronavirus 2
ANTVIWDYKRDAPAHISTIGVCS

SEQ ID NO: 97536 - protein, 23 aa, Severe acute respiratory syndrome coronavirus 2
NTVIWDYKRDAPAHISTIGVCSM

SEQ ID NO: 97537 - protein, 23 aa, Severe acute respiratory syndrome coronavirus 2
TVIWDYKRDAPAHISTIGVCSMT

SEQ ID NO: 97538 - protein, 23 aa, Severe acute respiratory syndrome coronavirus 2
VIWDYKRDAPAHISTIGVCSMTD

SEQ ID NO: 97539 - protein, 23 aa, Severe acute respiratory syndrome coronavirus 2
IWDYKRDAPAHISTIGVCSMTDI

SEQ ID NO: 97540 - protein, 23 aa, Severe acute respiratory syndrome coronavirus 2
WDYKRDAPAHISTIGVCSMTDIA

SEQ ID NO: 97541 - protein, 23 aa, Severe acute respiratory syndrome coronavirus 2
DYKRDAPAHISTIGVCSMTDIAK

SEQ ID NO: 97542 - protein, 23 aa, Severe acute respiratory syndrome coronavirus 2
YKRDAPAHISTIGVCSMTDIAKK

SEQ ID NO: 97543 - protein, 23 aa, Severe acute respiratory syndrome coronavirus 2
KRDAPAHISTIGVCSMTDIAKKP

SEQ ID NO: 97544 - protein, 23 aa, Severe acute respiratory syndrome coronavirus 2
RDAPAHISTIGVCSMTDIAKKPT

SEQ ID NO: 97545 - protein, 23 aa, Severe acute respiratory syndrome coronavirus 2
DAPAHISTIGVCSMTDIAKKPTE

SEQ ID NO: 97546 - protein, 23 aa, Severe acute respiratory syndrome coronavirus 2
EGSVKGLQPSVGPKQASLNGVTL

SEQ ID NO: 97547 - protein, 23 aa, Severe acute respiratory syndrome coronavirus 2
GSVKGLQPSVGPKQASLNGVTLI

SEQ ID NO: 97548 - protein, 23 aa, Severe acute respiratory syndrome coronavirus 2
SVKGLQPSVGPKQASLNGVTLIG

SEQ ID NO: 97549 - protein, 23 aa, Severe acute respiratory syndrome coronavirus 2
VKGLQPSVGPKQASLNGVTLIGE

SEQ ID NO: 97550 - protein, 23 aa, Severe acute respiratory syndrome coronavirus 2
KGLQPSVGPKQASLNGVTLIGEA

SEQ ID NO: 97551 - protein, 23 aa, Severe acute respiratory syndrome coronavirus 2
KTQFNYYKKVDGVVQQLPETYFT

SEQ ID NO: 97552 - protein, 23 aa, Severe acute respiratory syndrome coronavirus 2
TQFNYYKKVDGVVQQLPETYFTQ

SEQ ID NO: 97553 - protein, 23 aa, Severe acute respiratory syndrome coronavirus 2
QFNYYKKVDGVVQQLPETYFTQS

SEQ ID NO: 97554 - protein, 23 aa, Severe acute respiratory syndrome coronavirus 2
FNYYKKVDGVVQQLPETYFTQSR

SEQ ID NO: 97555 - protein, 23 aa, Severe acute respiratory syndrome coronavirus 2
NYYKKVDGVVQQLPETYFTQSRN

SEQ ID NO: 97556 - protein, 23 aa, Severe acute respiratory syndrome coronavirus 2
YYKKVDGVVQQLPETYFTQSRNL

SEQ ID NO: 97557 - protein, 23 aa, Severe acute respiratory syndrome coronavirus 2
YKKVDGVVQQLPETYFTQSRNLQ

SEQ ID NO: 97558 - protein, 23 aa, Severe acute respiratory syndrome coronavirus 2
KKVDGVVQQLPETYFTQSRNLQE

SEQ ID NO: 97559 - protein, 23 aa, Severe acute respiratory syndrome coronavirus 2
KVDGVVQQLPETYFTQSRNLQEF

SEQ ID NO: 97560 - protein, 23 aa, Severe acute respiratory syndrome coronavirus 2
VDGVVQQLPETYFTQSRNLQEFK

SEQ ID NO: 97561 - protein, 23 aa, Severe acute respiratory syndrome coronavirus 2
DGVVQQLPETYFTQSRNLQEFKP

SEQ ID NO: 97562 - protein, 23 aa, Severe acute respiratory syndrome coronavirus 2
VAPGTAVLRQWLPTGTLLVDSDL

SEQ ID NO: 97563 - protein, 23 aa, Severe acute respiratory syndrome coronavirus 2
APGTAVLRQWLPTGTLLVDSDLN

SEQ ID NO: 97564 - protein, 23 aa, Severe acute respiratory syndrome coronavirus 2
PGTAVLRQWLPTGTLLVDSDLND

SEQ ID NO: 97565 - protein, 23 aa, Severe acute respiratory syndrome coronavirus 2
GTAVLRQWLPTGTLLVDSDLNDF

SEQ ID NO: 97566 - protein, 23 aa, Severe acute respiratory syndrome coronavirus 2
TAVLRQWLPTGTLLVDSDLNDFV

SEQ ID NO: 97567 - protein, 23 aa, Severe acute respiratory syndrome coronavirus 2
AVLRQWLPTGTLLVDSDLNDFVS

SEQ ID NO: 97568 - protein, 23 aa, Severe acute respiratory syndrome coronavirus 2
VLRQWLPTGTLLVDSDLNDFVSD

SEQ ID NO: 97569 - protein, 23 aa, Severe acute respiratory syndrome coronavirus 2
LRQWLPTGTLLVDSDLNDFVSDA

SEQ ID NO: 97570 - protein, 23 aa, Severe acute respiratory syndrome coronavirus 2
LSSYSLFDMSKFPLKLRGTAVMS

SEQ ID NO: 97571 - protein, 23 aa, Severe acute respiratory syndrome coronavirus 2
SSYSLFDMSKFPLKLRGTAVMSL

SEQ ID NO: 97572 - protein, 23 aa, Severe acute respiratory syndrome coronavirus 2
SYSLFDMSKFPLKLRGTAVMSLK

SEQ ID NO: 97573 - protein, 23 aa, Severe acute respiratory syndrome coronavirus 2
YSLFDMSKFPLKLRGTAVMSLKE

SEQ ID NO: 97574 - protein, 24 aa, Severe acute respiratory syndrome coronavirus 2
KHDFFKFRIDGDMVPHISRQRLTK

SEQ ID NO: 97575 - protein, 24 aa, Severe acute respiratory syndrome coronavirus 2
HDFFKFRIDGDMVPHISRQRLTKY

SEQ ID NO: 97576 - protein, 24 aa, Severe acute respiratory syndrome coronavirus 2
DFFKFRIDGDMVPHISRQRLTKYT

SEQ ID NO: 97577 - protein, 24 aa, Severe acute respiratory syndrome coronavirus 2
FFKFRIDGDMVPHISRQRLTKYTM

SEQ ID NO: 97578 - protein, 24 aa, Severe acute respiratory syndrome coronavirus 2
FKFRIDGDMVPHISRQRLTKYTMA

SEQ ID NO: 97579 - protein, 24 aa, Severe acute respiratory syndrome coronavirus 2
KFRIDGDMVPHISRQRLTKYTMAD

SEQ ID NO: 97580 - protein, 24 aa, Severe acute respiratory syndrome coronavirus 2
FRIDGDMVPHISRQRLTKYTMADL

SEQ ID NO: 97581 - protein, 24 aa, Severe acute respiratory syndrome coronavirus 2
VPHISRQRLTKYTMADLVYALRHF

SEQ ID NO: 97582 - protein, 24 aa, Severe acute respiratory syndrome coronavirus 2
PHISRQRLTKYTMADLVYALRHFD

SEQ ID NO: 97583 - protein, 24 aa, Severe acute respiratory syndrome coronavirus 2
HISRQRLTKYTMADLVYALRHFDE

SEQ ID NO: 97584 - protein, 24 aa, Severe acute respiratory syndrome coronavirus 2
ISRQRLTKYTMADLVYALRHFDEG

SEQ ID NO: 97585 - protein, 24 aa, Severe acute respiratory syndrome coronavirus 2
SRQRLTKYTMADLVYALRHFDEGN

SEQ ID NO: 97586 - protein, 24 aa, Severe acute respiratory syndrome coronavirus 2
RQRLTKYTMADLVYALRHFDEGNC

SEQ ID NO: 97587 - protein, 24 aa, Severe acute respiratory syndrome coronavirus 2
QRLTKYTMADLVYALRHFDEGNCD

SEQ ID NO: 97588 - protein, 24 aa, Severe acute respiratory syndrome coronavirus 2
VQFCDAMRNAGIVGVLTLDNQDLN

SEQ ID NO: 97589 - protein, 24 aa, Severe acute respiratory syndrome coronavirus 2
QFCDAMRNAGIVGVLTLDNQDLNG

SEQ ID NO: 97590 - protein, 24 aa, Severe acute respiratory syndrome coronavirus 2
FCDAMRNAGIVGVLTLDNQDLNGN

SEQ ID NO: 97591 - protein, 24 aa, Severe acute respiratory syndrome coronavirus 2
CDAMRNAGIVGVLTLDNQDLNGNW

SEQ ID NO: 97592 - protein, 24 aa, Severe acute respiratory syndrome coronavirus 2
DAMRNAGIVGVLTLDNQDLNGNWY

SEQ ID NO: 97593 - protein, 24 aa, Severe acute respiratory syndrome coronavirus 2
AMRNAGIVGVLTLDNQDLNGNWYD

SEQ ID NO: 97594 - protein, 24 aa, Severe acute respiratory syndrome coronavirus 2
MRNAGIVGVLTLDNQDLNGNWYDF

SEQ ID NO: 97595 - protein, 24 aa, Severe acute respiratory syndrome coronavirus 2
RNAGIVGVLTLDNQDLNGNWYDFG

SEQ ID NO: 97596 - protein, 24 aa, Severe acute respiratory syndrome coronavirus 2
NAGIVGVLTLDNQDLNGNWYDFGD

SEQ ID NO: 97597 - protein, 24 aa, Severe acute respiratory syndrome coronavirus 2
VRKIFVDGVPFVVSTGYHFRELGV

SEQ ID NO: 97598 - protein, 24 aa, Severe acute respiratory syndrome coronavirus 2
RKIFVDGVPFVVSTGYHFRELGVV

SEQ ID NO: 97599 - protein, 24 aa, Severe acute respiratory syndrome coronavirus 2
KIFVDGVPFVVSTGYHFRELGVVH

SEQ ID NO: 97600 - protein, 24 aa, Severe acute respiratory syndrome coronavirus 2
IFVDGVPFVVSTGYHFRELGVVHN

SEQ ID NO: 97601 - protein, 24 aa, Severe acute respiratory syndrome coronavirus 2
YTKRNVIPTITQMNLKYAISAKNR

SEQ ID NO: 97602 - protein, 24 aa, Severe acute respiratory syndrome coronavirus 2
TKRNVIPTITQMNLKYAISAKNRA

SEQ ID NO: 97603 - protein, 24 aa, Severe acute respiratory syndrome coronavirus 2
KRNVIPTITQMNLKYAISAKNRAR

SEQ ID NO: 97604 - protein, 24 aa, Severe acute respiratory syndrome coronavirus 2
RNVIPTITQMNLKYAISAKNRART

SEQ ID NO: 97605 - protein, 24 aa, Severe acute respiratory syndrome coronavirus 2
NVIPTITQMNLKYAISAKNRARTV

SEQ ID NO: 97606 - protein, 24 aa, Severe acute respiratory syndrome coronavirus 2
VIPTITQMNLKYAISAKNRARTVA

SEQ ID NO: 97607 - protein, 24 aa, Severe acute respiratory syndrome coronavirus 2
IPTITQMNLKYAISAKNRARTVAG

SEQ ID NO: 97608 - protein, 24 aa, Severe acute respiratory syndrome coronavirus 2
PTITQMNLKYAISAKNRARTVAGV

SEQ ID NO: 97609 - protein, 24 aa, Severe acute respiratory syndrome coronavirus 2
TITQMNLKYAISAKNRARTVAGVS

SEQ ID NO: 97610 - protein, 24 aa, Severe acute respiratory syndrome coronavirus 2
ITQMNLKYAISAKNRARTVAGVSI

SEQ ID NO: 97611 - protein, 24 aa, Severe acute respiratory syndrome coronavirus 2
TQMNLKYAISAKNRARTVAGVSIC

SEQ ID NO: 97612 - protein, 24 aa, Severe acute respiratory syndrome coronavirus 2
QMNLKYAISAKNRARTVAGVSICS

SEQ ID NO: 97613 - protein, 24 aa, Severe acute respiratory syndrome coronavirus 2
MNLKYAISAKNRARTVAGVSICST

SEQ ID NO: 97614 - protein, 24 aa, Severe acute respiratory syndrome coronavirus 2
NLKYAISAKNRARTVAGVSICSTM

SEQ ID NO: 97615 - protein, 24 aa, Severe acute respiratory syndrome coronavirus 2
LKYAISAKNRARTVAGVSICSTMT

SEQ ID NO: 97616 - protein, 24 aa, Severe acute respiratory syndrome coronavirus 2
KYAISAKNRARTVAGVSICSTMTN

SEQ ID NO: 97617 - protein, 24 aa, Severe acute respiratory syndrome coronavirus 2
YAISAKNRARTVAGVSICSTMTNR

SEQ ID NO: 97618 - protein, 24 aa, Severe acute respiratory syndrome coronavirus 2
AISAKNRARTVAGVSICSTMTNRQ

SEQ ID NO: 97619 - protein, 24 aa, Severe acute respiratory syndrome coronavirus 2
ISAKNRARTVAGVSICSTMTNRQF

SEQ ID NO: 97620 - protein, 24 aa, Severe acute respiratory syndrome coronavirus 2
SAKNRARTVAGVSICSTMTNRQFH

SEQ ID NO: 97621 - protein, 24 aa, Severe acute respiratory syndrome coronavirus 2
AKNRARTVAGVSICSTMTNRQFHQ

SEQ ID NO: 97622 - protein, 24 aa, Severe acute respiratory syndrome coronavirus 2
KNRARTVAGVSICSTMTNRQFHQK

SEQ ID NO: 97623 - protein, 24 aa, Severe acute respiratory syndrome coronavirus 2
NRARTVAGVSICSTMTNRQFHQKL

SEQ ID NO: 97624 - protein, 24 aa, Severe acute respiratory syndrome coronavirus 2
RARTVAGVSICSTMTNRQFHQKLL

SEQ ID NO: 97625 - protein, 24 aa, Severe acute respiratory syndrome coronavirus 2
ARTVAGVSICSTMTNRQFHQKLLK

SEQ ID NO: 97626 - protein, 24 aa, Severe acute respiratory syndrome coronavirus 2
RTVAGVSICSTMTNRQFHQKLLKS

SEQ ID NO: 97627 - protein, 24 aa, Severe acute respiratory syndrome coronavirus 2
TVAGVSICSTMTNRQFHQKLLKSI

SEQ ID NO: 97628 - protein, 24 aa, Severe acute respiratory syndrome coronavirus 2
VAGVSICSTMTNRQFHQKLLKSIA

SEQ ID NO: 97629 - protein, 24 aa, Severe acute respiratory syndrome coronavirus 2
AGVSICSTMTNRQFHQKLLKSIAA

SEQ ID NO: 97630 - protein, 24 aa, Severe acute respiratory syndrome coronavirus 2
GVSICSTMTNRQFHQKLLKSIAAT

SEQ ID NO: 97631 - protein, 24 aa, Severe acute respiratory syndrome coronavirus 2
VSICSTMTNRQFHQKLLKSIAATR

SEQ ID NO: 97632 - protein, 24 aa, Severe acute respiratory syndrome coronavirus 2
SICSTMTNRQFHQKLLKSIAATRG

SEQ ID NO: 97633 - protein, 24 aa, Severe acute respiratory syndrome coronavirus 2
ICSTMTNRQFHQKLLKSIAATRGA

SEQ ID NO: 97634 - protein, 24 aa, Severe acute respiratory syndrome coronavirus 2
CSTMTNRQFHQKLLKSIAATRGAT

SEQ ID NO: 97635 - protein, 24 aa, Severe acute respiratory syndrome coronavirus 2
CGGSLYVKPGGTSSGDATTAYANS

SEQ ID NO: 97636 - protein, 24 aa, Severe acute respiratory syndrome coronavirus 2
GGSLYVKPGGTSSGDATTAYANSV

SEQ ID NO: 97637 - protein, 24 aa, Severe acute respiratory syndrome coronavirus 2
GSLYVKPGGTSSGDATTAYANSVF

SEQ ID NO: 97638 - protein, 24 aa, Severe acute respiratory syndrome coronavirus 2
SLYVKPGGTSSGDATTAYANSVFN

SEQ ID NO: 97639 - protein, 24 aa, Severe acute respiratory syndrome coronavirus 2
LYVKPGGTSSGDATTAYANSVFNI

SEQ ID NO: 97640 - protein, 24 aa, Severe acute respiratory syndrome coronavirus 2
YVKPGGTSSGDATTAYANSVFNIC

SEQ ID NO: 97641 - protein, 24 aa, Severe acute respiratory syndrome coronavirus 2
VKPGGTSSGDATTAYANSVFNICQ

SEQ ID NO: 97642 - protein, 24 aa, Severe acute respiratory syndrome coronavirus 2
KPGGTSSGDATTAYANSVFNICQA

SEQ ID NO: 97643 - protein, 24 aa, Severe acute respiratory syndrome coronavirus 2
PGGTSSGDATTAYANSVFNICQAV

SEQ ID NO: 97644 - protein, 24 aa, Severe acute respiratory syndrome coronavirus 2
GGTSSGDATTAYANSVFNICQAVT

SEQ ID NO: 97645 - protein, 24 aa, Severe acute respiratory syndrome coronavirus 2
GTSSGDATTAYANSVFNICQAVTA

SEQ ID NO: 97646 - protein, 24 aa, Severe acute respiratory syndrome coronavirus 2
TSSGDATTAYANSVFNICQAVTAN

SEQ ID NO: 97647 - protein, 24 aa, Severe acute respiratory syndrome coronavirus 2
SSGDATTAYANSVFNICQAVTANV

SEQ ID NO: 97648 - protein, 24 aa, Severe acute respiratory syndrome coronavirus 2
SGDATTAYANSVFNICQAVTANVN

SEQ ID NO: 97649 - protein, 24 aa, Severe acute respiratory syndrome coronavirus 2
GDATTAYANSVFNICQAVTANVNA

SEQ ID NO: 97650 - protein, 24 aa, Severe acute respiratory syndrome coronavirus 2
DATTAYANSVFNICQAVTANVNAL

SEQ ID NO: 97651 - protein, 24 aa, Severe acute respiratory syndrome coronavirus 2
ATTAYANSVFNICQAVTANVNALL

SEQ ID NO: 97652 - protein, 24 aa, Severe acute respiratory syndrome coronavirus 2
TTAYANSVFNICQAVTANVNALLS

SEQ ID NO: 97653 - protein, 24 aa, Severe acute respiratory syndrome coronavirus 2
TAYANSVFNICQAVTANVNALLST

SEQ ID NO: 97654 - protein, 24 aa, Severe acute respiratory syndrome coronavirus 2
AYANSVFNICQAVTANVNALLSTD

SEQ ID NO: 97655 - protein, 24 aa, Severe acute respiratory syndrome coronavirus 2
YANSVFNICQAVTANVNALLSTDG

SEQ ID NO: 97656 - protein, 24 aa, Severe acute respiratory syndrome coronavirus 2
ANSVFNICQAVTANVNALLSTDGN

SEQ ID NO: 97657 - protein, 24 aa, Severe acute respiratory syndrome coronavirus 2
NSVFNICQAVTANVNALLSTDGNK

SEQ ID NO: 97658 - protein, 24 aa, Severe acute respiratory syndrome coronavirus 2
SVFNICQAVTANVNALLSTDGNKI

SEQ ID NO: 97659 - protein, 24 aa, Severe acute respiratory syndrome coronavirus 2
VFNICQAVTANVNALLSTDGNKIA

SEQ ID NO: 97660 - protein, 24 aa, Severe acute respiratory syndrome coronavirus 2
FNICQAVTANVNALLSTDGNKIAD

SEQ ID NO: 97661 - protein, 24 aa, Severe acute respiratory syndrome coronavirus 2
NICQAVTANVNALLSTDGNKIADK

SEQ ID NO: 97662 - protein, 24 aa, Severe acute respiratory syndrome coronavirus 2
ICQAVTANVNALLSTDGNKIADKY

SEQ ID NO: 97663 - protein, 24 aa, Severe acute respiratory syndrome coronavirus 2
CQAVTANVNALLSTDGNKIADKYV

SEQ ID NO: 97664 - protein, 24 aa, Severe acute respiratory syndrome coronavirus 2
QAVTANVNALLSTDGNKIADKYVR

SEQ ID NO: 97665 - protein, 24 aa, Severe acute respiratory syndrome coronavirus 2
AVTANVNALLSTDGNKIADKYVRN

SEQ ID NO: 97666 - protein, 24 aa, Severe acute respiratory syndrome coronavirus 2
VTANVNALLSTDGNKIADKYVRNL

SEQ ID NO: 97667 - protein, 24 aa, Severe acute respiratory syndrome coronavirus 2
TANVNALLSTDGNKIADKYVRNLQ

SEQ ID NO: 97668 - protein, 24 aa, Severe acute respiratory syndrome coronavirus 2
ANVNALLSTDGNKIADKYVRNLQH

SEQ ID NO: 97669 - protein, 24 aa, Severe acute respiratory syndrome coronavirus 2
NVNALLSTDGNKIADKYVRNLQHR

SEQ ID NO: 97670 - protein, 24 aa, Severe acute respiratory syndrome coronavirus 2
VNALLSTDGNKIADKYVRNLQHRL

SEQ ID NO: 97671 - protein, 24 aa, Severe acute respiratory syndrome coronavirus 2
NALLSTDGNKIADKYVRNLQHRLY

SEQ ID NO: 97672 - protein, 24 aa, Severe acute respiratory syndrome coronavirus 2
ALLSTDGNKIADKYVRNLQHRLYE

SEQ ID NO: 97673 - protein, 24 aa, Severe acute respiratory syndrome coronavirus 2
LLSTDGNKIADKYVRNLQHRLYEC

SEQ ID NO: 97674 - protein, 24 aa, Severe acute respiratory syndrome coronavirus 2
LSTDGNKIADKYVRNLQHRLYECL

SEQ ID NO: 97675 - protein, 24 aa, Severe acute respiratory syndrome coronavirus 2
STDGNKIADKYVRNLQHRLYECLY

SEQ ID NO: 97676 - protein, 24 aa, Severe acute respiratory syndrome coronavirus 2
TDGNKIADKYVRNLQHRLYECLYR

SEQ ID NO: 97677 - protein, 24 aa, Severe acute respiratory syndrome coronavirus 2
LVASIKNFKSVLYYQNNVFMSEAK

SEQ ID NO: 97678 - protein, 24 aa, Severe acute respiratory syndrome coronavirus 2
VASIKNFKSVLYYQNNVFMSEAKC

SEQ ID NO: 97679 - protein, 24 aa, Severe acute respiratory syndrome coronavirus 2
ASIKNFKSVLYYQNNVFMSEAKCW

SEQ ID NO: 97680 - protein, 24 aa, Severe acute respiratory syndrome coronavirus 2
NFKSVLYYQNNVFMSEAKCWTETD

SEQ ID NO: 97681 - protein, 24 aa, Severe acute respiratory syndrome coronavirus 2
FKSVLYYQNNVFMSEAKCWTETDL

SEQ ID NO: 97682 - protein, 24 aa, Severe acute respiratory syndrome coronavirus 2
PSRILGAGCFVDDIVKTDGTLMIE

SEQ ID NO: 97683 - protein, 24 aa, Severe acute respiratory syndrome coronavirus 2
SRILGAGCFVDDIVKTDGTLMIER

SEQ ID NO: 97684 - protein, 24 aa, Severe acute respiratory syndrome coronavirus 2
RILGAGCFVDDIVKTDGTLMIERF

SEQ ID NO: 97685 - protein, 24 aa, Severe acute respiratory syndrome coronavirus 2
ILGAGCFVDDIVKTDGTLMIERFV

SEQ ID NO: 97686 - protein, 24 aa, Severe acute respiratory syndrome coronavirus 2
LGAGCFVDDIVKTDGTLMIERFVS

SEQ ID NO: 97687 - protein, 24 aa, Severe acute respiratory syndrome coronavirus 2
GAGCFVDDIVKTDGTLMIERFVSL

SEQ ID NO: 97688 - protein, 24 aa, Severe acute respiratory syndrome coronavirus 2
AGCFVDDIVKTDGTLMIERFVSLA

SEQ ID NO: 97689 - protein, 24 aa, Severe acute respiratory syndrome coronavirus 2
GCFVDDIVKTDGTLMIERFVSLAI

SEQ ID NO: 97690 - protein, 24 aa, Severe acute respiratory syndrome coronavirus 2
CFVDDIVKTDGTLMIERFVSLAID

SEQ ID NO: 97691 - protein, 24 aa, Severe acute respiratory syndrome coronavirus 2
FVDDIVKTDGTLMIERFVSLAIDA

SEQ ID NO: 97692 - protein, 24 aa, Severe acute respiratory syndrome coronavirus 2
VDDIVKTDGTLMIERFVSLAIDAY

SEQ ID NO: 97693 - protein, 24 aa, Severe acute respiratory syndrome coronavirus 2
DDIVKTDGTLMIERFVSLAIDAYP

SEQ ID NO: 97694 - protein, 24 aa, Severe acute respiratory syndrome coronavirus 2
VTDFNAIATCDWTNAGDYILANTC

SEQ ID NO: 97695 - protein, 24 aa, Severe acute respiratory syndrome coronavirus 2
HAAVDALCEKALKYLPIDKCSRII

SEQ ID NO: 97696 - protein, 24 aa, Severe acute respiratory syndrome coronavirus 2
AAVDALCEKALKYLPIDKCSRIIP

SEQ ID NO: 97697 - protein, 24 aa, Severe acute respiratory syndrome coronavirus 2
AVDALCEKALKYLPIDKCSRIIPA

SEQ ID NO: 97698 - protein, 24 aa, Severe acute respiratory syndrome coronavirus 2
VDALCEKALKYLPIDKCSRIIPAR

SEQ ID NO: 97699 - protein, 24 aa, Severe acute respiratory syndrome coronavirus 2
DALCEKALKYLPIDKCSRIIPARA

SEQ ID NO: 97700 - protein, 24 aa, Severe acute respiratory syndrome coronavirus 2
ALCEKALKYLPIDKCSRIIPARAR

SEQ ID NO: 97701 - protein, 24 aa, Severe acute respiratory syndrome coronavirus 2
KALKYLPIDKCSRIIPARARVECF

SEQ ID NO: 97702 - protein, 24 aa, Severe acute respiratory syndrome coronavirus 2
ALKYLPIDKCSRIIPARARVECFD

SEQ ID NO: 97703 - protein, 24 aa, Severe acute respiratory syndrome coronavirus 2
LKYLPIDKCSRIIPARARVECFDK

SEQ ID NO: 97704 - protein, 24 aa, Severe acute respiratory syndrome coronavirus 2
KYLPIDKCSRIIPARARVECFDKF

SEQ ID NO: 97705 - protein, 24 aa, Severe acute respiratory syndrome coronavirus 2
YLPIDKCSRIIPARARVECFDKFK

SEQ ID NO: 97706 - protein, 24 aa, Severe acute respiratory syndrome coronavirus 2
GIPKDMTYRRLISMMGFKMNYQVN

SEQ ID NO: 97707 - protein, 24 aa, Severe acute respiratory syndrome coronavirus 2
IPKDMTYRRLISMMGFKMNYQVNG

SEQ ID NO: 97708 - protein, 24 aa, Severe acute respiratory syndrome coronavirus 2
PKDMTYRRLISMMGFKMNYQVNGY

SEQ ID NO: 97709 - protein, 24 aa, Severe acute respiratory syndrome coronavirus 2
KDMTYRRLISMMGFKMNYQVNGYP

SEQ ID NO: 97710 - protein, 24 aa, Severe acute respiratory syndrome coronavirus 2
DMTYRRLISMMGFKMNYQVNGYPN

SEQ ID NO: 97711 - protein, 24 aa, Severe acute respiratory syndrome coronavirus 2
MTYRRLISMMGFKMNYQVNGYPNM

SEQ ID NO: 97712 - protein, 24 aa, Severe acute respiratory syndrome coronavirus 2
TYRRLISMMGFKMNYQVNGYPNMF

SEQ ID NO: 97713 - protein, 24 aa, Severe acute respiratory syndrome coronavirus 2
YRRLISMMGFKMNYQVNGYPNMFI

SEQ ID NO: 97714 - protein, 24 aa, Severe acute respiratory syndrome coronavirus 2
RRLISMMGFKMNYQVNGYPNMFIT

SEQ ID NO: 97715 - protein, 24 aa, Severe acute respiratory syndrome coronavirus 2
RLISMMGFKMNYQVNGYPNMFITR

SEQ ID NO: 97716 - protein, 24 aa, Severe acute respiratory syndrome coronavirus 2
LISMMGFKMNYQVNGYPNMFITRE

SEQ ID NO: 97717 - protein, 24 aa, Severe acute respiratory syndrome coronavirus 2
ISMMGFKMNYQVNGYPNMFITREE

SEQ ID NO: 97718 - protein, 24 aa, Severe acute respiratory syndrome coronavirus 2
SMMGFKMNYQVNGYPNMFITREEA

SEQ ID NO: 97719 - protein, 24 aa, Severe acute respiratory syndrome coronavirus 2
MMGFKMNYQVNGYPNMFITREEAI

SEQ ID NO: 97720 - protein, 24 aa, Severe acute respiratory syndrome coronavirus 2
HVRAWIGFDVEGCHATREAVGTNL

SEQ ID NO: 97721 - protein, 24 aa, Severe acute respiratory syndrome coronavirus 2
VRAWIGFDVEGCHATREAVGTNLP

SEQ ID NO: 97722 - protein, 24 aa, Severe acute respiratory syndrome coronavirus 2
RAWIGFDVEGCHATREAVGTNLPL

SEQ ID NO: 97723 - protein, 24 aa, Severe acute respiratory syndrome coronavirus 2
WIGFDVEGCHATREAVGTNLPLQL

SEQ ID NO: 97724 - protein, 24 aa, Severe acute respiratory syndrome coronavirus 2
IGFDVEGCHATREAVGTNLPLQLG

SEQ ID NO: 97725 - protein, 24 aa, Severe acute respiratory syndrome coronavirus 2
SDRVVFVLWAHGFELTSMKYFVKI

SEQ ID NO: 97726 - protein, 24 aa, Severe acute respiratory syndrome coronavirus 2
DRVVFVLWAHGFELTSMKYFVKIG

SEQ ID NO: 97727 - protein, 24 aa, Severe acute respiratory syndrome coronavirus 2
RVVFVLWAHGFELTSMKYFVKIGP

SEQ ID NO: 97728 - protein, 24 aa, Severe acute respiratory syndrome coronavirus 2
VVFVLWAHGFELTSMKYFVKIGPE

SEQ ID NO: 97729 - protein, 24 aa, Severe acute respiratory syndrome coronavirus 2
VFVLWAHGFELTSMKYFVKIGPER

SEQ ID NO: 97730 - protein, 24 aa, Severe acute respiratory syndrome coronavirus 2
FVLWAHGFELTSMKYFVKIGPERT

SEQ ID NO: 97731 - protein, 24 aa, Severe acute respiratory syndrome coronavirus 2
VLWAHGFELTSMKYFVKIGPERTC

SEQ ID NO: 97732 - protein, 24 aa, Severe acute respiratory syndrome coronavirus 2
LWAHGFELTSMKYFVKIGPERTCC

SEQ ID NO: 97733 - protein, 24 aa, Severe acute respiratory syndrome coronavirus 2
WAHGFELTSMKYFVKIGPERTCCL

SEQ ID NO: 97734 - protein, 24 aa, Severe acute respiratory syndrome coronavirus 2
AHGFELTSMKYFVKIGPERTCCLC

SEQ ID NO: 97735 - protein, 24 aa, Severe acute respiratory syndrome coronavirus 2
HGFELTSMKYFVKIGPERTCCLCD

SEQ ID NO: 97736 - protein, 24 aa, Severe acute respiratory syndrome coronavirus 2
DKFPVLHDIGNPKAIKCVPQADVE

SEQ ID NO: 97737 - protein, 24 aa, Severe acute respiratory syndrome coronavirus 2
KFPVLHDIGNPKAIKCVPQADVEW

SEQ ID NO: 97738 - protein, 24 aa, Severe acute respiratory syndrome coronavirus 2
GVCLFWNCNVDRYPANSIVCRFDT

SEQ ID NO: 97739 - protein, 24 aa, Severe acute respiratory syndrome coronavirus 2
VCLFWNCNVDRYPANSIVCRFDTR

SEQ ID NO: 97740 - protein, 24 aa, Severe acute respiratory syndrome coronavirus 2
CLFWNCNVDRYPANSIVCRFDTRV

SEQ ID NO: 97741 - protein, 24 aa, Severe acute respiratory syndrome coronavirus 2
LFWNCNVDRYPANSIVCRFDTRVL

SEQ ID NO: 97742 - protein, 24 aa, Severe acute respiratory syndrome coronavirus 2
FWNCNVDRYPANSIVCRFDTRVLS

SEQ ID NO: 97743 - protein, 24 aa, Severe acute respiratory syndrome coronavirus 2
WNCNVDRYPANSIVCRFDTRVLSN

SEQ ID NO: 97744 - protein, 24 aa, Severe acute respiratory syndrome coronavirus 2
NCNVDRYPANSIVCRFDTRVLSNL

SEQ ID NO: 97745 - protein, 24 aa, Severe acute respiratory syndrome coronavirus 2
CNVDRYPANSIVCRFDTRVLSNLN

SEQ ID NO: 97746 - protein, 24 aa, Severe acute respiratory syndrome coronavirus 2
NVDRYPANSIVCRFDTRVLSNLNL

SEQ ID NO: 97747 - protein, 24 aa, Severe acute respiratory syndrome coronavirus 2
IAANTVIWDYKRDAPAHISTIGVC

SEQ ID NO: 97748 - protein, 24 aa, Severe acute respiratory syndrome coronavirus 2
AANTVIWDYKRDAPAHISTIGVCS

SEQ ID NO: 97749 - protein, 24 aa, Severe acute respiratory syndrome coronavirus 2
ANTVIWDYKRDAPAHISTIGVCSM

SEQ ID NO: 97750 - protein, 24 aa, Severe acute respiratory syndrome coronavirus 2
NTVIWDYKRDAPAHISTIGVCSMT

SEQ ID NO: 97751 - protein, 24 aa, Severe acute respiratory syndrome coronavirus 2
TVIWDYKRDAPAHISTIGVCSMTD

SEQ ID NO: 97752 - protein, 24 aa, Severe acute respiratory syndrome coronavirus 2
VIWDYKRDAPAHISTIGVCSMTDI

SEQ ID NO: 97753 - protein, 24 aa, Severe acute respiratory syndrome coronavirus 2
IWDYKRDAPAHISTIGVCSMTDIA

SEQ ID NO: 97754 - protein, 24 aa, Severe acute respiratory syndrome coronavirus 2
WDYKRDAPAHISTIGVCSMTDIAK

SEQ ID NO: 97755 - protein, 24 aa, Severe acute respiratory syndrome coronavirus 2
DYKRDAPAHISTIGVCSMTDIAKK

SEQ ID NO: 97756 - protein, 24 aa, Severe acute respiratory syndrome coronavirus 2
YKRDAPAHISTIGVCSMTDIAKKP

SEQ ID NO: 97757 - protein, 24 aa, Severe acute respiratory syndrome coronavirus 2
KRDAPAHISTIGVCSMTDIAKKPT

SEQ ID NO: 97758 - protein, 24 aa, Severe acute respiratory syndrome coronavirus 2
RDAPAHISTIGVCSMTDIAKKPTE

SEQ ID NO: 97759 - protein, 24 aa, Severe acute respiratory syndrome coronavirus 2
EGSVKGLQPSVGPKQASLNGVTLI

SEQ ID NO: 97760 - protein, 24 aa, Severe acute respiratory syndrome coronavirus 2
GSVKGLQPSVGPKQASLNGVTLIG

SEQ ID NO: 97761 - protein, 24 aa, Severe acute respiratory syndrome coronavirus 2
SVKGLQPSVGPKQASLNGVTLIGE

SEQ ID NO: 97762 - protein, 24 aa, Severe acute respiratory syndrome coronavirus 2
VKGLQPSVGPKQASLNGVTLIGEA

SEQ ID NO: 97763 - protein, 24 aa, Severe acute respiratory syndrome coronavirus 2
KTQFNYYKKVDGVVQQLPETYFTQ

SEQ ID NO: 97764 - protein, 24 aa, Severe acute respiratory syndrome coronavirus 2
TQFNYYKKVDGVVQQLPETYFTQS

SEQ ID NO: 97765 - protein, 24 aa, Severe acute respiratory syndrome coronavirus 2
QFNYYKKVDGVVQQLPETYFTQSR

SEQ ID NO: 97766 - protein, 24 aa, Severe acute respiratory syndrome coronavirus 2
FNYYKKVDGVVQQLPETYFTQSRN

SEQ ID NO: 97767 - protein, 24 aa, Severe acute respiratory syndrome coronavirus 2
NYYKKVDGVVQQLPETYFTQSRNL

SEQ ID NO: 97768 - protein, 24 aa, Severe acute respiratory syndrome coronavirus 2
YYKKVDGVVQQLPETYFTQSRNLQ

SEQ ID NO: 97769 - protein, 24 aa, Severe acute respiratory syndrome coronavirus 2
YKKVDGVVQQLPETYFTQSRNLQE

SEQ ID NO: 97770 - protein, 24 aa, Severe acute respiratory syndrome coronavirus 2
KKVDGVVQQLPETYFTQSRNLQEF

SEQ ID NO: 97771 - protein, 24 aa, Severe acute respiratory syndrome coronavirus 2
KVDGVVQQLPETYFTQSRNLQEFK

SEQ ID NO: 97772 - protein, 24 aa, Severe acute respiratory syndrome coronavirus 2
VDGVVQQLPETYFTQSRNLQEFKP

SEQ ID NO: 97773 - protein, 24 aa, Severe acute respiratory syndrome coronavirus 2
VAPGTAVLRQWLPTGTLLVDSDLN

SEQ ID NO: 97774 - protein, 24 aa, Severe acute respiratory syndrome coronavirus 2
APGTAVLRQWLPTGTLLVDSDLND

SEQ ID NO: 97775 - protein, 24 aa, Severe acute respiratory syndrome coronavirus 2
PGTAVLRQWLPTGTLLVDSDLNDF

SEQ ID NO: 97776 - protein, 24 aa, Severe acute respiratory syndrome coronavirus 2
GTAVLRQWLPTGTLLVDSDLNDFV

SEQ ID NO: 97777 - protein, 24 aa, Severe acute respiratory syndrome coronavirus 2
TAVLRQWLPTGTLLVDSDLNDFVS

SEQ ID NO: 97778 - protein, 24 aa, Severe acute respiratory syndrome coronavirus 2
AVLRQWLPTGTLLVDSDLNDFVSD

SEQ ID NO: 97779 - protein, 24 aa, Severe acute respiratory syndrome coronavirus 2
VLRQWLPTGTLLVDSDLNDFVSDA

SEQ ID NO: 97780 - protein, 24 aa, Severe acute respiratory syndrome coronavirus 2
LSSYSLFDMSKFPLKLRGTAVMSL

SEQ ID NO: 97781 - protein, 24 aa, Severe acute respiratory syndrome coronavirus 2
SSYSLFDMSKFPLKLRGTAVMSLK

SEQ ID NO: 97782 - protein, 24 aa, Severe acute respiratory syndrome coronavirus 2
SYSLFDMSKFPLKLRGTAVMSLKE

SEQ ID NO: 97783 - protein, 25 aa, Severe acute respiratory syndrome coronavirus 2
KHDFFKFRIDGDMVPHISRQRLTKY

SEQ ID NO: 97784 - protein, 25 aa, Severe acute respiratory syndrome coronavirus 2
HDFFKFRIDGDMVPHISRQRLTKYT

SEQ ID NO: 97785 - protein, 25 aa, Severe acute respiratory syndrome coronavirus 2
DFFKFRIDGDMVPHISRQRLTKYTM

SEQ ID NO: 97786 - protein, 25 aa, Severe acute respiratory syndrome coronavirus 2
FFKFRIDGDMVPHISRQRLTKYTMA

SEQ ID NO: 97787 - protein, 25 aa, Severe acute respiratory syndrome coronavirus 2
FKFRIDGDMVPHISRQRLTKYTMAD

SEQ ID NO: 97788 - protein, 25 aa, Severe acute respiratory syndrome coronavirus 2
KFRIDGDMVPHISRQRLTKYTMADL

SEQ ID NO: 97789 - protein, 25 aa, Severe acute respiratory syndrome coronavirus 2
VPHISRQRLTKYTMADLVYALRHFD

SEQ ID NO: 97790 - protein, 25 aa, Severe acute respiratory syndrome coronavirus 2
PHISRQRLTKYTMADLVYALRHFDE

SEQ ID NO: 97791 - protein, 25 aa, Severe acute respiratory syndrome coronavirus 2
HISRQRLTKYTMADLVYALRHFDEG

SEQ ID NO: 97792 - protein, 25 aa, Severe acute respiratory syndrome coronavirus 2
ISRQRLTKYTMADLVYALRHFDEGN

SEQ ID NO: 97793 - protein, 25 aa, Severe acute respiratory syndrome coronavirus 2
SRQRLTKYTMADLVYALRHFDEGNC

SEQ ID NO: 97794 - protein, 25 aa, Severe acute respiratory syndrome coronavirus 2
RQRLTKYTMADLVYALRHFDEGNCD

SEQ ID NO: 97795 - protein, 25 aa, Severe acute respiratory syndrome coronavirus 2
VQFCDAMRNAGIVGVLTLDNQDLNG

SEQ ID NO: 97796 - protein, 25 aa, Severe acute respiratory syndrome coronavirus 2
QFCDAMRNAGIVGVLTLDNQDLNGN

SEQ ID NO: 97797 - protein, 25 aa, Severe acute respiratory syndrome coronavirus 2
FCDAMRNAGIVGVLTLDNQDLNGNW

SEQ ID NO: 97798 - protein, 25 aa, Severe acute respiratory syndrome coronavirus 2
CDAMRNAGIVGVLTLDNQDLNGNWY

SEQ ID NO: 97799 - protein, 25 aa, Severe acute respiratory syndrome coronavirus 2
DAMRNAGIVGVLTLDNQDLNGNWYD

SEQ ID NO: 97800 - protein, 25 aa, Severe acute respiratory syndrome coronavirus 2
AMRNAGIVGVLTLDNQDLNGNWYDF

SEQ ID NO: 97801 - protein, 25 aa, Severe acute respiratory syndrome coronavirus 2
MRNAGIVGVLTLDNQDLNGNWYDFG

SEQ ID NO: 97802 - protein, 25 aa, Severe acute respiratory syndrome coronavirus 2
RNAGIVGVLTLDNQDLNGNWYDFGD

SEQ ID NO: 97803 - protein, 25 aa, Severe acute respiratory syndrome coronavirus 2
VRKIFVDGVPFVVSTGYHFRELGVV

SEQ ID NO: 97804 - protein, 25 aa, Severe acute respiratory syndrome coronavirus 2
RKIFVDGVPFVVSTGYHFRELGVVH

SEQ ID NO: 97805 - protein, 25 aa, Severe acute respiratory syndrome coronavirus 2
KIFVDGVPFVVSTGYHFRELGVVHN

SEQ ID NO: 97806 - protein, 25 aa, Severe acute respiratory syndrome coronavirus 2
YTKRNVIPTITQMNLKYAISAKNRA

SEQ ID NO: 97807 - protein, 25 aa, Severe acute respiratory syndrome coronavirus 2
TKRNVIPTITQMNLKYAISAKNRAR

SEQ ID NO: 97808 - protein, 25 aa, Severe acute respiratory syndrome coronavirus 2
KRNVIPTITQMNLKYAISAKNRART

SEQ ID NO: 97809 - protein, 25 aa, Severe acute respiratory syndrome coronavirus 2
RNVIPTITQMNLKYAISAKNRARTV

SEQ ID NO: 97810 - protein, 25 aa, Severe acute respiratory syndrome coronavirus 2
NVIPTITQMNLKYAISAKNRARTVA

SEQ ID NO: 97811 - protein, 25 aa, Severe acute respiratory syndrome coronavirus 2
VIPTITQMNLKYAISAKNRARTVAG

SEQ ID NO: 97812 - protein, 25 aa, Severe acute respiratory syndrome coronavirus 2
IPTITQMNLKYAISAKNRARTVAGV

SEQ ID NO: 97813 - protein, 25 aa, Severe acute respiratory syndrome coronavirus 2
PTITQMNLKYAISAKNRARTVAGVS

SEQ ID NO: 97814 - protein, 25 aa, Severe acute respiratory syndrome coronavirus 2
TITQMNLKYAISAKNRARTVAGVSI

SEQ ID NO: 97815 - protein, 25 aa, Severe acute respiratory syndrome coronavirus 2
ITQMNLKYAISAKNRARTVAGVSIC

SEQ ID NO: 97816 - protein, 25 aa, Severe acute respiratory syndrome coronavirus 2
TQMNLKYAISAKNRARTVAGVSICS

SEQ ID NO: 97817 - protein, 25 aa, Severe acute respiratory syndrome coronavirus 2
QMNLKYAISAKNRARTVAGVSICST

SEQ ID NO: 97818 - protein, 25 aa, Severe acute respiratory syndrome coronavirus 2
MNLKYAISAKNRARTVAGVSICSTM

SEQ ID NO: 97819 - protein, 25 aa, Severe acute respiratory syndrome coronavirus 2
NLKYAISAKNRARTVAGVSICSTMT

SEQ ID NO: 97820 - protein, 25 aa, Severe acute respiratory syndrome coronavirus 2
LKYAISAKNRARTVAGVSICSTMTN

SEQ ID NO: 97821 - protein, 25 aa, Severe acute respiratory syndrome coronavirus 2
KYAISAKNRARTVAGVSICSTMTNR

SEQ ID NO: 97822 - protein, 25 aa, Severe acute respiratory syndrome coronavirus 2
YAISAKNRARTVAGVSICSTMTNRQ

SEQ ID NO: 97823 - protein, 25 aa, Severe acute respiratory syndrome coronavirus 2
AISAKNRARTVAGVSICSTMTNRQF

SEQ ID NO: 97824 - protein, 25 aa, Severe acute respiratory syndrome coronavirus 2
ISAKNRARTVAGVSICSTMTNRQFH

SEQ ID NO: 97825 - protein, 25 aa, Severe acute respiratory syndrome coronavirus 2
SAKNRARTVAGVSICSTMTNRQFHQ

SEQ ID NO: 97826 - protein, 25 aa, Severe acute respiratory syndrome coronavirus 2
AKNRARTVAGVSICSTMTNRQFHQK

SEQ ID NO: 97827 - protein, 25 aa, Severe acute respiratory syndrome coronavirus 2
KNRARTVAGVSICSTMTNRQFHQKL

SEQ ID NO: 97828 - protein, 25 aa, Severe acute respiratory syndrome coronavirus 2
NRARTVAGVSICSTMTNRQFHQKLL

SEQ ID NO: 97829 - protein, 25 aa, Severe acute respiratory syndrome coronavirus 2
RARTVAGVSICSTMTNRQFHQKLLK

SEQ ID NO: 97830 - protein, 25 aa, Severe acute respiratory syndrome coronavirus 2
ARTVAGVSICSTMTNRQFHQKLLKS

SEQ ID NO: 97831 - protein, 25 aa, Severe acute respiratory syndrome coronavirus 2
RTVAGVSICSTMTNRQFHQKLLKSI

SEQ ID NO: 97832 - protein, 25 aa, Severe acute respiratory syndrome coronavirus 2
TVAGVSICSTMTNRQFHQKLLKSIA

SEQ ID NO: 97833 - protein, 25 aa, Severe acute respiratory syndrome coronavirus 2
VAGVSICSTMTNRQFHQKLLKSIAA

SEQ ID NO: 97834 - protein, 25 aa, Severe acute respiratory syndrome coronavirus 2
AGVSICSTMTNRQFHQKLLKSIAAT

SEQ ID NO: 97835 - protein, 25 aa, Severe acute respiratory syndrome coronavirus 2
GVSICSTMTNRQFHQKLLKSIAATR

SEQ ID NO: 97836 - protein, 25 aa, Severe acute respiratory syndrome coronavirus 2
VSICSTMTNRQFHQKLLKSIAATRG

SEQ ID NO: 97837 - protein, 25 aa, Severe acute respiratory syndrome coronavirus 2
SICSTMTNRQFHQKLLKSIAATRGA

SEQ ID NO: 97838 - protein, 25 aa, Severe acute respiratory syndrome coronavirus 2
ICSTMTNRQFHQKLLKSIAATRGAT

SEQ ID NO: 97839 - protein, 25 aa, Severe acute respiratory syndrome coronavirus 2
CGGSLYVKPGGTSSGDATTAYANSV

SEQ ID NO: 97840 - protein, 25 aa, Severe acute respiratory syndrome coronavirus 2
GGSLYVKPGGTSSGDATTAYANSVF

SEQ ID NO: 97841 - protein, 25 aa, Severe acute respiratory syndrome coronavirus 2
GSLYVKPGGTSSGDATTAYANSVFN

SEQ ID NO: 97842 - protein, 25 aa, Severe acute respiratory syndrome coronavirus 2
SLYVKPGGTSSGDATTAYANSVFNI

SEQ ID NO: 97843 - protein, 25 aa, Severe acute respiratory syndrome coronavirus 2
LYVKPGGTSSGDATTAYANSVFNIC

SEQ ID NO: 97844 - protein, 25 aa, Severe acute respiratory syndrome coronavirus 2
YVKPGGTSSGDATTAYANSVFNICQ

SEQ ID NO: 97845 - protein, 25 aa, Severe acute respiratory syndrome coronavirus 2
VKPGGTSSGDATTAYANSVFNICQA

SEQ ID NO: 97846 - protein, 25 aa, Severe acute respiratory syndrome coronavirus 2
KPGGTSSGDATTAYANSVFNICQAV

SEQ ID NO: 97847 - protein, 25 aa, Severe acute respiratory syndrome coronavirus 2
PGGTSSGDATTAYANSVFNICQAVT

SEQ ID NO: 97848 - protein, 25 aa, Severe acute respiratory syndrome coronavirus 2
GGTSSGDATTAYANSVFNICQAVTA

SEQ ID NO: 97849 - protein, 25 aa, Severe acute respiratory syndrome coronavirus 2
GTSSGDATTAYANSVFNICQAVTAN

SEQ ID NO: 97850 - protein, 25 aa, Severe acute respiratory syndrome coronavirus 2
TSSGDATTAYANSVFNICQAVTANV

SEQ ID NO: 97851 - protein, 25 aa, Severe acute respiratory syndrome coronavirus 2
SSGDATTAYANSVFNICQAVTANVN

SEQ ID NO: 97852 - protein, 25 aa, Severe acute respiratory syndrome coronavirus 2
SGDATTAYANSVFNICQAVTANVNA

SEQ ID NO: 97853 - protein, 25 aa, Severe acute respiratory syndrome coronavirus 2
GDATTAYANSVFNICQAVTANVNAL

SEQ ID NO: 97854 - protein, 25 aa, Severe acute respiratory syndrome coronavirus 2
DATTAYANSVFNICQAVTANVNALL

SEQ ID NO: 97855 - protein, 25 aa, Severe acute respiratory syndrome coronavirus 2
ATTAYANSVFNICQAVTANVNALLS

SEQ ID NO: 97856 - protein, 25 aa, Severe acute respiratory syndrome coronavirus 2
TTAYANSVFNICQAVTANVNALLST

SEQ ID NO: 97857 - protein, 25 aa, Severe acute respiratory syndrome coronavirus 2
TAYANSVFNICQAVTANVNALLSTD

SEQ ID NO: 97858 - protein, 25 aa, Severe acute respiratory syndrome coronavirus 2
AYANSVFNICQAVTANVNALLSTDG

SEQ ID NO: 97859 - protein, 25 aa, Severe acute respiratory syndrome coronavirus 2
YANSVFNICQAVTANVNALLSTDGN

SEQ ID NO: 97860 - protein, 25 aa, Severe acute respiratory syndrome coronavirus 2
ANSVFNICQAVTANVNALLSTDGNK

SEQ ID NO: 97861 - protein, 25 aa, Severe acute respiratory syndrome coronavirus 2
NSVFNICQAVTANVNALLSTDGNKI

SEQ ID NO: 97862 - protein, 25 aa, Severe acute respiratory syndrome coronavirus 2
SVFNICQAVTANVNALLSTDGNKIA

SEQ ID NO: 97863 - protein, 25 aa, Severe acute respiratory syndrome coronavirus 2
VFNICQAVTANVNALLSTDGNKIAD

SEQ ID NO: 97864 - protein, 25 aa, Severe acute respiratory syndrome coronavirus 2
FNICQAVTANVNALLSTDGNKIADK

SEQ ID NO: 97865 - protein, 25 aa, Severe acute respiratory syndrome coronavirus 2
NICQAVTANVNALLSTDGNKIADKY

SEQ ID NO: 97866 - protein, 25 aa, Severe acute respiratory syndrome coronavirus 2
ICQAVTANVNALLSTDGNKIADKYV

SEQ ID NO: 97867 - protein, 25 aa, Severe acute respiratory syndrome coronavirus 2
CQAVTANVNALLSTDGNKIADKYVR

SEQ ID NO: 97868 - protein, 25 aa, Severe acute respiratory syndrome coronavirus 2
QAVTANVNALLSTDGNKIADKYVRN

SEQ ID NO: 97869 - protein, 25 aa, Severe acute respiratory syndrome coronavirus 2
AVTANVNALLSTDGNKIADKYVRNL

SEQ ID NO: 97870 - protein, 25 aa, Severe acute respiratory syndrome coronavirus 2
VTANVNALLSTDGNKIADKYVRNLQ

SEQ ID NO: 97871 - protein, 25 aa, Severe acute respiratory syndrome coronavirus 2
TANVNALLSTDGNKIADKYVRNLQH

SEQ ID NO: 97872 - protein, 25 aa, Severe acute respiratory syndrome coronavirus 2
ANVNALLSTDGNKIADKYVRNLQHR

SEQ ID NO: 97873 - protein, 25 aa, Severe acute respiratory syndrome coronavirus 2
NVNALLSTDGNKIADKYVRNLQHRL

SEQ ID NO: 97874 - protein, 25 aa, Severe acute respiratory syndrome coronavirus 2
VNALLSTDGNKIADKYVRNLQHRLY

SEQ ID NO: 97875 - protein, 25 aa, Severe acute respiratory syndrome coronavirus 2
NALLSTDGNKIADKYVRNLQHRLYE

SEQ ID NO: 97876 - protein, 25 aa, Severe acute respiratory syndrome coronavirus 2
ALLSTDGNKIADKYVRNLQHRLYEC

SEQ ID NO: 97877 - protein, 25 aa, Severe acute respiratory syndrome coronavirus 2
LLSTDGNKIADKYVRNLQHRLYECL

SEQ ID NO: 97878 - protein, 25 aa, Severe acute respiratory syndrome coronavirus 2
LSTDGNKIADKYVRNLQHRLYECLY

SEQ ID NO: 97879 - protein, 25 aa, Severe acute respiratory syndrome coronavirus 2
STDGNKIADKYVRNLQHRLYECLYR

SEQ ID NO: 97880 - protein, 25 aa, Severe acute respiratory syndrome coronavirus 2
LVASIKNFKSVLYYQNNVFMSEAKC

SEQ ID NO: 97881 - protein, 25 aa, Severe acute respiratory syndrome coronavirus 2
VASIKNFKSVLYYQNNVFMSEAKCW

SEQ ID NO: 97882 - protein, 25 aa, Severe acute respiratory syndrome coronavirus 2
NFKSVLYYQNNVFMSEAKCWTETDL

SEQ ID NO: 97883 - protein, 25 aa, Severe acute respiratory syndrome coronavirus 2
PSRILGAGCFVDDIVKTDGTLMIER

SEQ ID NO: 97884 - protein, 25 aa, Severe acute respiratory syndrome coronavirus 2
SRILGAGCFVDDIVKTDGTLMIERF

SEQ ID NO: 97885 - protein, 25 aa, Severe acute respiratory syndrome coronavirus 2
RILGAGCFVDDIVKTDGTLMIERFV

SEQ ID NO: 97886 - protein, 25 aa, Severe acute respiratory syndrome coronavirus 2
ILGAGCFVDDIVKTDGTLMIERFVS

SEQ ID NO: 97887 - protein, 25 aa, Severe acute respiratory syndrome coronavirus 2
LGAGCFVDDIVKTDGTLMIERFVSL

SEQ ID NO: 97888 - protein, 25 aa, Severe acute respiratory syndrome coronavirus 2
GAGCFVDDIVKTDGTLMIERFVSLA

SEQ ID NO: 97889 - protein, 25 aa, Severe acute respiratory syndrome coronavirus 2
AGCFVDDIVKTDGTLMIERFVSLAI

SEQ ID NO: 97890 - protein, 25 aa, Severe acute respiratory syndrome coronavirus 2
GCFVDDIVKTDGTLMIERFVSLAID

SEQ ID NO: 97891 - protein, 25 aa, Severe acute respiratory syndrome coronavirus 2
CFVDDIVKTDGTLMIERFVSLAIDA

SEQ ID NO: 97892 - protein, 25 aa, Severe acute respiratory syndrome coronavirus 2
FVDDIVKTDGTLMIERFVSLAIDAY

SEQ ID NO: 97893 - protein, 25 aa, Severe acute respiratory syndrome coronavirus 2
VDDIVKTDGTLMIERFVSLAIDAYP

SEQ ID NO: 97894 - protein, 25 aa, Severe acute respiratory syndrome coronavirus 2
HAAVDALCEKALKYLPIDKCSRIIP

SEQ ID NO: 97895 - protein, 25 aa, Severe acute respiratory syndrome coronavirus 2
AAVDALCEKALKYLPIDKCSRIIPA

SEQ ID NO: 97896 - protein, 25 aa, Severe acute respiratory syndrome coronavirus 2
AVDALCEKALKYLPIDKCSRIIPAR

SEQ ID NO: 97897 - protein, 25 aa, Severe acute respiratory syndrome coronavirus 2
VDALCEKALKYLPIDKCSRIIPARA

SEQ ID NO: 97898 - protein, 25 aa, Severe acute respiratory syndrome coronavirus 2
DALCEKALKYLPIDKCSRIIPARAR

SEQ ID NO: 97899 - protein, 25 aa, Severe acute respiratory syndrome coronavirus 2
KALKYLPIDKCSRIIPARARVECFD

SEQ ID NO: 97900 - protein, 25 aa, Severe acute respiratory syndrome coronavirus 2
ALKYLPIDKCSRIIPARARVECFDK

SEQ ID NO: 97901 - protein, 25 aa, Severe acute respiratory syndrome coronavirus 2
LKYLPIDKCSRIIPARARVECFDKF

SEQ ID NO: 97902 - protein, 25 aa, Severe acute respiratory syndrome coronavirus 2
KYLPIDKCSRIIPARARVECFDKFK

SEQ ID NO: 97903 - protein, 25 aa, Severe acute respiratory syndrome coronavirus 2
GIPKDMTYRRLISMMGFKMNYQVNG

SEQ ID NO: 97904 - protein, 25 aa, Severe acute respiratory syndrome coronavirus 2
IPKDMTYRRLISMMGFKMNYQVNGY

SEQ ID NO: 97905 - protein, 25 aa, Severe acute respiratory syndrome coronavirus 2
PKDMTYRRLISMMGFKMNYQVNGYP

SEQ ID NO: 97906 - protein, 25 aa, Severe acute respiratory syndrome coronavirus 2
KDMTYRRLISMMGFKMNYQVNGYPN

SEQ ID NO: 97907 - protein, 25 aa, Severe acute respiratory syndrome coronavirus 2
MTYRRLISMMGFKMNYQVNGYPNMF

SEQ ID NO: 97908 - protein, 25 aa, Severe acute respiratory syndrome coronavirus 2
TYRRLISMMGFKMNYQVNGYPNMFI

SEQ ID NO: 97909 - protein, 25 aa, Severe acute respiratory syndrome coronavirus 2
YRRLISMMGFKMNYQVNGYPNMFIT

SEQ ID NO: 97910 - protein, 25 aa, Severe acute respiratory syndrome coronavirus 2
RRLISMMGFKMNYQVNGYPNMFITR

SEQ ID NO: 97911 - protein, 25 aa, Severe acute respiratory syndrome coronavirus 2
RLISMMGFKMNYQVNGYPNMFITRE

SEQ ID NO: 97912 - protein, 25 aa, Severe acute respiratory syndrome coronavirus 2
LISMMGFKMNYQVNGYPNMFITREE

SEQ ID NO: 97913 - protein, 25 aa, Severe acute respiratory syndrome coronavirus 2
ISMMGFKMNYQVNGYPNMFITREEA

SEQ ID NO: 97914 - protein, 25 aa, Severe acute respiratory syndrome coronavirus 2
SMMGFKMNYQVNGYPNMFITREEAI

SEQ ID NO: 97915 - protein, 25 aa, Severe acute respiratory syndrome coronavirus 2
HVRAWIGFDVEGCHATREAVGTNLP

SEQ ID NO: 97916 - protein, 25 aa, Severe acute respiratory syndrome coronavirus 2
VRAWIGFDVEGCHATREAVGTNLPL

SEQ ID NO: 97917 - protein, 25 aa, Severe acute respiratory syndrome coronavirus 2
RAWIGFDVEGCHATREAVGTNLPLQ

SEQ ID NO: 97918 - protein, 25 aa, Severe acute respiratory syndrome coronavirus 2
AWIGFDVEGCHATREAVGTNLPLQL

SEQ ID NO: 97919 - protein, 25 aa, Severe acute respiratory syndrome coronavirus 2
WIGFDVEGCHATREAVGTNLPLQLG

SEQ ID NO: 97920 - protein, 25 aa, Severe acute respiratory syndrome coronavirus 2
SDRVVFVLWAHGFELTSMKYFVKIG

SEQ ID NO: 97921 - protein, 25 aa, Severe acute respiratory syndrome coronavirus 2
DRVVFVLWAHGFELTSMKYFVKIGP

SEQ ID NO: 97922 - protein, 25 aa, Severe acute respiratory syndrome coronavirus 2
RVVFVLWAHGFELTSMKYFVKIGPE

SEQ ID NO: 97923 - protein, 25 aa, Severe acute respiratory syndrome coronavirus 2
VVFVLWAHGFELTSMKYFVKIGPER

SEQ ID NO: 97924 - protein, 25 aa, Severe acute respiratory syndrome coronavirus 2
FVLWAHGFELTSMKYFVKIGPERTC

SEQ ID NO: 97925 - protein, 25 aa, Severe acute respiratory syndrome coronavirus 2
VLWAHGFELTSMKYFVKIGPERTCC

SEQ ID NO: 97926 - protein, 25 aa, Severe acute respiratory syndrome coronavirus 2
LWAHGFELTSMKYFVKIGPERTCCL

SEQ ID NO: 97927 - protein, 25 aa, Severe acute respiratory syndrome coronavirus 2
WAHGFELTSMKYFVKIGPERTCCLC

SEQ ID NO: 97928 - protein, 25 aa, Severe acute respiratory syndrome coronavirus 2
AHGFELTSMKYFVKIGPERTCCLCD

SEQ ID NO: 97929 - protein, 25 aa, Severe acute respiratory syndrome coronavirus 2
DKFPVLHDIGNPKAIKCVPQADVEW

SEQ ID NO: 97930 - protein, 25 aa, Severe acute respiratory syndrome coronavirus 2
GVCLFWNCNVDRYPANSIVCRFDTR

SEQ ID NO: 97931 - protein, 25 aa, Severe acute respiratory syndrome coronavirus 2
VCLFWNCNVDRYPANSIVCRFDTRV

SEQ ID NO: 97932 - protein, 25 aa, Severe acute respiratory syndrome coronavirus 2
CLFWNCNVDRYPANSIVCRFDTRVL

SEQ ID NO: 97933 - protein, 25 aa, Severe acute respiratory syndrome coronavirus 2
LFWNCNVDRYPANSIVCRFDTRVLS

SEQ ID NO: 97934 - protein, 25 aa, Severe acute respiratory syndrome coronavirus 2
FWNCNVDRYPANSIVCRFDTRVLSN

SEQ ID NO: 97935 - protein, 25 aa, Severe acute respiratory syndrome coronavirus 2
WNCNVDRYPANSIVCRFDTRVLSNL

SEQ ID NO: 97936 - protein, 25 aa, Severe acute respiratory syndrome coronavirus 2
NCNVDRYPANSIVCRFDTRVLSNLN

SEQ ID NO: 97937 - protein, 25 aa, Severe acute respiratory syndrome coronavirus 2
CNVDRYPANSIVCRFDTRVLSNLNL

SEQ ID NO: 97938 - protein, 25 aa, Severe acute respiratory syndrome coronavirus 2
IAANTVIWDYKRDAPAHISTIGVCS

SEQ ID NO: 97939 - protein, 25 aa, Severe acute respiratory syndrome coronavirus 2
AANTVIWDYKRDAPAHISTIGVCSM

SEQ ID NO: 97940 - protein, 25 aa, Severe acute respiratory syndrome coronavirus 2
ANTVIWDYKRDAPAHISTIGVCSMT

SEQ ID NO: 97941 - protein, 25 aa, Severe acute respiratory syndrome coronavirus 2
NTVIWDYKRDAPAHISTIGVCSMTD

SEQ ID NO: 97942 - protein, 25 aa, Severe acute respiratory syndrome coronavirus 2
TVIWDYKRDAPAHISTIGVCSMTDI

SEQ ID NO: 97943 - protein, 25 aa, Severe acute respiratory syndrome coronavirus 2
VIWDYKRDAPAHISTIGVCSMTDIA

SEQ ID NO: 97944 - protein, 25 aa, Severe acute respiratory syndrome coronavirus 2
IWDYKRDAPAHISTIGVCSMTDIAK

SEQ ID NO: 97945 - protein, 25 aa, Severe acute respiratory syndrome coronavirus 2
WDYKRDAPAHISTIGVCSMTDIAKK

SEQ ID NO: 97946 - protein, 25 aa, Severe acute respiratory syndrome coronavirus 2
DYKRDAPAHISTIGVCSMTDIAKKP

SEQ ID NO: 97947 - protein, 25 aa, Severe acute respiratory syndrome coronavirus 2
YKRDAPAHISTIGVCSMTDIAKKPT

SEQ ID NO: 97948 - protein, 25 aa, Severe acute respiratory syndrome coronavirus 2
KRDAPAHISTIGVCSMTDIAKKPTE

SEQ ID NO: 97949 - protein, 25 aa, Severe acute respiratory syndrome coronavirus 2
EGSVKGLQPSVGPKQASLNGVTLIG

SEQ ID NO: 97950 - protein, 25 aa, Severe acute respiratory syndrome coronavirus 2
GSVKGLQPSVGPKQASLNGVTLIGE

SEQ ID NO: 97951 - protein, 25 aa, Severe acute respiratory syndrome coronavirus 2
KTQFNYYKKVDGVVQQLPETYFTQS

SEQ ID NO: 97952 - protein, 25 aa, Severe acute respiratory syndrome coronavirus 2
TQFNYYKKVDGVVQQLPETYFTQSR

SEQ ID NO: 97953 - protein, 25 aa, Severe acute respiratory syndrome coronavirus 2
QFNYYKKVDGVVQQLPETYFTQSRN

SEQ ID NO: 97954 - protein, 25 aa, Severe acute respiratory syndrome coronavirus 2
FNYYKKVDGVVQQLPETYFTQSRNL

SEQ ID NO: 97955 - protein, 25 aa, Severe acute respiratory syndrome coronavirus 2
NYYKKVDGVVQQLPETYFTQSRNLQ

SEQ ID NO: 97956 - protein, 25 aa, Severe acute respiratory syndrome coronavirus 2
YYKKVDGVVQQLPETYFTQSRNLQE

SEQ ID NO: 97957 - protein, 25 aa, Severe acute respiratory syndrome coronavirus 2
YKKVDGVVQQLPETYFTQSRNLQEF

SEQ ID NO: 97958 - protein, 25 aa, Severe acute respiratory syndrome coronavirus 2
KKVDGVVQQLPETYFTQSRNLQEFK

SEQ ID NO: 97959 - protein, 25 aa, Severe acute respiratory syndrome coronavirus 2
KVDGVVQQLPETYFTQSRNLQEFKP

SEQ ID NO: 97960 - protein, 25 aa, Severe acute respiratory syndrome coronavirus 2
VAPGTAVLRQWLPTGTLLVDSDLND

SEQ ID NO: 97961 - protein, 25 aa, Severe acute respiratory syndrome coronavirus 2
APGTAVLRQWLPTGTLLVDSDLNDF

SEQ ID NO: 97962 - protein, 25 aa, Severe acute respiratory syndrome coronavirus 2
PGTAVLRQWLPTGTLLVDSDLNDFV

SEQ ID NO: 97963 - protein, 25 aa, Severe acute respiratory syndrome coronavirus 2
GTAVLRQWLPTGTLLVDSDLNDFVS

SEQ ID NO: 97964 - protein, 25 aa, Severe acute respiratory syndrome coronavirus 2
TAVLRQWLPTGTLLVDSDLNDFVSD

SEQ ID NO: 97965 - protein, 25 aa, Severe acute respiratory syndrome coronavirus 2
AVLRQWLPTGTLLVDSDLNDFVSDA

SEQ ID NO: 97966 - protein, 25 aa, Severe acute respiratory syndrome coronavirus 2
LSSYSLFDMSKFPLKLRGTAVMSLK

SEQ ID NO: 97967 - protein, 25 aa, Severe acute respiratory syndrome coronavirus 2
SSYSLFDMSKFPLKLRGTAVMSLKE

SEQ ID NO: 97968 - protein, 13 aa, Severe acute respiratory syndrome coronavirus 2
KDCVVLHSYFTSD

SEQ ID NO: 97969 - protein, 13 aa, Severe acute respiratory syndrome coronavirus 2
DCVVLHSYFTSDY

SEQ ID NO: 97970 - protein, 13 aa, Severe acute respiratory syndrome coronavirus 2
CVVLHSYFTSDYY

SEQ ID NO: 97971 - protein, 13 aa, Severe acute respiratory syndrome coronavirus 2
VVLHSYFTSDYYQ

SEQ ID NO: 97972 - protein, 13 aa, Severe acute respiratory syndrome coronavirus 2
VLHSYFTSDYYQL

SEQ ID NO: 97973 - protein, 13 aa, Severe acute respiratory syndrome coronavirus 2
LHSYFTSDYYQLY

SEQ ID NO: 97974 - protein, 13 aa, Severe acute respiratory syndrome coronavirus 2
HSYFTSDYYQLYS

SEQ ID NO: 97975 - protein, 13 aa, Severe acute respiratory syndrome coronavirus 2
SYFTSDYYQLYST

SEQ ID NO: 97976 - protein, 13 aa, Severe acute respiratory syndrome coronavirus 2
YFTSDYYQLYSTQ

SEQ ID NO: 97977 - protein, 13 aa, Severe acute respiratory syndrome coronavirus 2
GVEHVTFFIYNKI

SEQ ID NO: 97978 - protein, 13 aa, Severe acute respiratory syndrome coronavirus 2
VEHVTFFIYNKIV

SEQ ID NO: 97979 - protein, 13 aa, Severe acute respiratory syndrome coronavirus 2
EHVTFFIYNKIVD

SEQ ID NO: 97980 - protein, 14 aa, Severe acute respiratory syndrome coronavirus 2
GVKDCVVLHSYFTS

SEQ ID NO: 97981 - protein, 14 aa, Severe acute respiratory syndrome coronavirus 2
VKDCVVLHSYFTSD

SEQ ID NO: 97982 - protein, 14 aa, Severe acute respiratory syndrome coronavirus 2
KDCVVLHSYFTSDY

SEQ ID NO: 97983 - protein, 14 aa, Severe acute respiratory syndrome coronavirus 2
DCVVLHSYFTSDYY

SEQ ID NO: 97984 - protein, 14 aa, Severe acute respiratory syndrome coronavirus 2
CVVLHSYFTSDYYQ

SEQ ID NO: 97985 - protein, 14 aa, Severe acute respiratory syndrome coronavirus 2
VVLHSYFTSDYYQL

SEQ ID NO: 97986 - protein, 14 aa, Severe acute respiratory syndrome coronavirus 2
VLHSYFTSDYYQLY

SEQ ID NO: 97987 - protein, 14 aa, Severe acute respiratory syndrome coronavirus 2
LHSYFTSDYYQLYS

SEQ ID NO: 97988 - protein, 14 aa, Severe acute respiratory syndrome coronavirus 2
HSYFTSDYYQLYST

SEQ ID NO: 97989 - protein, 14 aa, Severe acute respiratory syndrome coronavirus 2
SYFTSDYYQLYSTQ

SEQ ID NO: 97990 - protein, 14 aa, Severe acute respiratory syndrome coronavirus 2
GVEHVTFFIYNKIV

SEQ ID NO: 97991 - protein, 14 aa, Severe acute respiratory syndrome coronavirus 2
VEHVTFFIYNKIVD

SEQ ID NO: 97992 - protein, 15 aa, Severe acute respiratory syndrome coronavirus 2
WESGVKDCVVLHSYF

SEQ ID NO: 97993 - protein, 15 aa, Severe acute respiratory syndrome coronavirus 2
ESGVKDCVVLHSYFT

SEQ ID NO: 97994 - protein, 15 aa, Severe acute respiratory syndrome coronavirus 2
SGVKDCVVLHSYFTS

SEQ ID NO: 97995 - protein, 15 aa, Severe acute respiratory syndrome coronavirus 2
GVKDCVVLHSYFTSD

SEQ ID NO: 97996 - protein, 15 aa, Severe acute respiratory syndrome coronavirus 2
VKDCVVLHSYFTSDY

SEQ ID NO: 97997 - protein, 15 aa, Severe acute respiratory syndrome coronavirus 2
KDCVVLHSYFTSDYY

SEQ ID NO: 97998 - protein, 15 aa, Severe acute respiratory syndrome coronavirus 2
DCVVLHSYFTSDYYQ

SEQ ID NO: 97999 - protein, 15 aa, Severe acute respiratory syndrome coronavirus 2
CVVLHSYFTSDYYQL

SEQ ID NO: 98000 - protein, 15 aa, Severe acute respiratory syndrome coronavirus 2
VVLHSYFTSDYYQLY

SEQ ID NO: 98001 - protein, 15 aa, Severe acute respiratory syndrome coronavirus 2
VLHSYFTSDYYQLYS

SEQ ID NO: 98002 - protein, 15 aa, Severe acute respiratory syndrome coronavirus 2
LHSYFTSDYYQLYST

SEQ ID NO: 98003 - protein, 15 aa, Severe acute respiratory syndrome coronavirus 2
HSYFTSDYYQLYSTQ

SEQ ID NO: 98004 - protein, 15 aa, Severe acute respiratory syndrome coronavirus 2
GVEHVTFFIYNKIVD

SEQ ID NO: 98005 - protein, 16 aa, Severe acute respiratory syndrome coronavirus 2
WESGVKDCVVLHSYFT

SEQ ID NO: 98006 - protein, 16 aa, Severe acute respiratory syndrome coronavirus 2
ESGVKDCVVLHSYFTS

SEQ ID NO: 98007 - protein, 16 aa, Severe acute respiratory syndrome coronavirus 2
SGVKDCVVLHSYFTSD

SEQ ID NO: 98008 - protein, 16 aa, Severe acute respiratory syndrome coronavirus 2
GVKDCVVLHSYFTSDY

SEQ ID NO: 98009 - protein, 16 aa, Severe acute respiratory syndrome coronavirus 2
VKDCVVLHSYFTSDYY

SEQ ID NO: 98010 - protein, 16 aa, Severe acute respiratory syndrome coronavirus 2
KDCVVLHSYFTSDYYQ

SEQ ID NO: 98011 - protein, 16 aa, Severe acute respiratory syndrome coronavirus 2
DCVVLHSYFTSDYYQL

SEQ ID NO: 98012 - protein, 16 aa, Severe acute respiratory syndrome coronavirus 2
CVVLHSYFTSDYYQLY

SEQ ID NO: 98013 - protein, 16 aa, Severe acute respiratory syndrome coronavirus 2
VVLHSYFTSDYYQLYS

SEQ ID NO: 98014 - protein, 16 aa, Severe acute respiratory syndrome coronavirus 2
VLHSYFTSDYYQLYST

SEQ ID NO: 98015 - protein, 16 aa, Severe acute respiratory syndrome coronavirus 2
LHSYFTSDYYQLYSTQ

SEQ ID NO: 98016 - protein, 17 aa, Severe acute respiratory syndrome coronavirus 2
KWESGVKDCVVLHSYFT

SEQ ID NO: 98017 - protein, 17 aa, Severe acute respiratory syndrome coronavirus 2
WESGVKDCVVLHSYFTS

SEQ ID NO: 98018 - protein, 17 aa, Severe acute respiratory syndrome coronavirus 2
ESGVKDCVVLHSYFTSD

SEQ ID NO: 98019 - protein, 17 aa, Severe acute respiratory syndrome coronavirus 2
SGVKDCVVLHSYFTSDY

SEQ ID NO: 98020 - protein, 17 aa, Severe acute respiratory syndrome coronavirus 2
GVKDCVVLHSYFTSDYY

SEQ ID NO: 98021 - protein, 17 aa, Severe acute respiratory syndrome coronavirus 2
VKDCVVLHSYFTSDYYQ

SEQ ID NO: 98022 - protein, 17 aa, Severe acute respiratory syndrome coronavirus 2
KDCVVLHSYFTSDYYQL

SEQ ID NO: 98023 - protein, 17 aa, Severe acute respiratory syndrome coronavirus 2
DCVVLHSYFTSDYYQLY

SEQ ID NO: 98024 - protein, 17 aa, Severe acute respiratory syndrome coronavirus 2
CVVLHSYFTSDYYQLYS

SEQ ID NO: 98025 - protein, 17 aa, Severe acute respiratory syndrome coronavirus 2
VVLHSYFTSDYYQLYST

SEQ ID NO: 98026 - protein, 17 aa, Severe acute respiratory syndrome coronavirus 2
VLHSYFTSDYYQLYSTQ

SEQ ID NO: 98027 - protein, 18 aa, Severe acute respiratory syndrome coronavirus 2
WESGVKDCVVLHSYFTSD

SEQ ID NO: 98028 - protein, 18 aa, Severe acute respiratory syndrome coronavirus 2
ESGVKDCVVLHSYFTSDY

SEQ ID NO: 98029 - protein, 18 aa, Severe acute respiratory syndrome coronavirus 2
SGVKDCVVLHSYFTSDYY

SEQ ID NO: 98030 - protein, 18 aa, Severe acute respiratory syndrome coronavirus 2
GVKDCVVLHSYFTSDYYQ

SEQ ID NO: 98031 - protein, 18 aa, Severe acute respiratory syndrome coronavirus 2
VKDCVVLHSYFTSDYYQL

SEQ ID NO: 98032 - protein, 18 aa, Severe acute respiratory syndrome coronavirus 2
KDCVVLHSYFTSDYYQLY

SEQ ID NO: 98033 - protein, 18 aa, Severe acute respiratory syndrome coronavirus 2
DCVVLHSYFTSDYYQLYS

SEQ ID NO: 98034 - protein, 18 aa, Severe acute respiratory syndrome coronavirus 2
CVVLHSYFTSDYYQLYST

SEQ ID NO: 98035 - protein, 18 aa, Severe acute respiratory syndrome coronavirus 2
VVLHSYFTSDYYQLYSTQ

SEQ ID NO: 98036 - protein, 19 aa, Severe acute respiratory syndrome coronavirus 2
EKWESGVKDCVVLHSYFTS

SEQ ID NO: 98037 - protein, 19 aa, Severe acute respiratory syndrome coronavirus 2
KWESGVKDCVVLHSYFTSD

SEQ ID NO: 98038 - protein, 19 aa, Severe acute respiratory syndrome coronavirus 2
WESGVKDCVVLHSYFTSDY

SEQ ID NO: 98039 - protein, 19 aa, Severe acute respiratory syndrome coronavirus 2
ESGVKDCVVLHSYFTSDYY

SEQ ID NO: 98040 - protein, 19 aa, Severe acute respiratory syndrome coronavirus 2
SGVKDCVVLHSYFTSDYYQ

SEQ ID NO: 98041 - protein, 19 aa, Severe acute respiratory syndrome coronavirus 2
GVKDCVVLHSYFTSDYYQL

SEQ ID NO: 98042 - protein, 19 aa, Severe acute respiratory syndrome coronavirus 2
KDCVVLHSYFTSDYYQLYS

SEQ ID NO: 98043 - protein, 19 aa, Severe acute respiratory syndrome coronavirus 2
DCVVLHSYFTSDYYQLYST

SEQ ID NO: 98044 - protein, 19 aa, Severe acute respiratory syndrome coronavirus 2
CVVLHSYFTSDYYQLYSTQ

SEQ ID NO: 98045 - protein, 20 aa, Severe acute respiratory syndrome coronavirus 2
TEKWESGVKDCVVLHSYFTS

SEQ ID NO: 98046 - protein, 20 aa, Severe acute respiratory syndrome coronavirus 2
EKWESGVKDCVVLHSYFTSD

SEQ ID NO: 98047 - protein, 20 aa, Severe acute respiratory syndrome coronavirus 2
KWESGVKDCVVLHSYFTSDY

SEQ ID NO: 98048 - protein, 20 aa, Severe acute respiratory syndrome coronavirus 2
WESGVKDCVVLHSYFTSDYY

SEQ ID NO: 98049 - protein, 20 aa, Severe acute respiratory syndrome coronavirus 2
ESGVKDCVVLHSYFTSDYYQ

SEQ ID NO: 98050 - protein, 20 aa, Severe acute respiratory syndrome coronavirus 2
SGVKDCVVLHSYFTSDYYQL

SEQ ID NO: 98051 - protein, 20 aa, Severe acute respiratory syndrome coronavirus 2
GVKDCVVLHSYFTSDYYQLY

SEQ ID NO: 98052 - protein, 20 aa, Severe acute respiratory syndrome coronavirus 2
VKDCVVLHSYFTSDYYQLYS

SEQ ID NO: 98053 - protein, 20 aa, Severe acute respiratory syndrome coronavirus 2
KDCVVLHSYFTSDYYQLYST

SEQ ID NO: 98054 - protein, 20 aa, Severe acute respiratory syndrome coronavirus 2
DCVVLHSYFTSDYYQLYSTQ

SEQ ID NO: 98055 - protein, 21 aa, Severe acute respiratory syndrome coronavirus 2
TEKWESGVKDCVVLHSYFTSD

SEQ ID NO: 98056 - protein, 21 aa, Severe acute respiratory syndrome coronavirus 2
EKWESGVKDCVVLHSYFTSDY

SEQ ID NO: 98057 - protein, 21 aa, Severe acute respiratory syndrome coronavirus 2
KWESGVKDCVVLHSYFTSDYY

SEQ ID NO: 98058 - protein, 21 aa, Severe acute respiratory syndrome coronavirus 2
WESGVKDCVVLHSYFTSDYYQ

SEQ ID NO: 98059 - protein, 21 aa, Severe acute respiratory syndrome coronavirus 2
ESGVKDCVVLHSYFTSDYYQL

SEQ ID NO: 98060 - protein, 21 aa, Severe acute respiratory syndrome coronavirus 2
SGVKDCVVLHSYFTSDYYQLY

SEQ ID NO: 98061 - protein, 21 aa, Severe acute respiratory syndrome coronavirus 2
GVKDCVVLHSYFTSDYYQLYS

SEQ ID NO: 98062 - protein, 21 aa, Severe acute respiratory syndrome coronavirus 2
VKDCVVLHSYFTSDYYQLYST

SEQ ID NO: 98063 - protein, 21 aa, Severe acute respiratory syndrome coronavirus 2
KDCVVLHSYFTSDYYQLYSTQ

SEQ ID NO: 98064 - protein, 22 aa, Severe acute respiratory syndrome coronavirus 2
TEKWESGVKDCVVLHSYFTSDY

SEQ ID NO: 98065 - protein, 22 aa, Severe acute respiratory syndrome coronavirus 2
EKWESGVKDCVVLHSYFTSDYY

SEQ ID NO: 98066 - protein, 22 aa, Severe acute respiratory syndrome coronavirus 2
KWESGVKDCVVLHSYFTSDYYQ

SEQ ID NO: 98067 - protein, 22 aa, Severe acute respiratory syndrome coronavirus 2
WESGVKDCVVLHSYFTSDYYQL

SEQ ID NO: 98068 - protein, 22 aa, Severe acute respiratory syndrome coronavirus 2
ESGVKDCVVLHSYFTSDYYQLY

SEQ ID NO: 98069 - protein, 22 aa, Severe acute respiratory syndrome coronavirus 2
SGVKDCVVLHSYFTSDYYQLYS

SEQ ID NO: 98070 - protein, 22 aa, Severe acute respiratory syndrome coronavirus 2
GVKDCVVLHSYFTSDYYQLYST

SEQ ID NO: 98071 - protein, 22 aa, Severe acute respiratory syndrome coronavirus 2
VKDCVVLHSYFTSDYYQLYSTQ

SEQ ID NO: 98072 - protein, 23 aa, Severe acute respiratory syndrome coronavirus 2
TEKWESGVKDCVVLHSYFTSDYY

SEQ ID NO: 98073 - protein, 23 aa, Severe acute respiratory syndrome coronavirus 2
KWESGVKDCVVLHSYFTSDYYQL

SEQ ID NO: 98074 - protein, 23 aa, Severe acute respiratory syndrome coronavirus 2
WESGVKDCVVLHSYFTSDYYQLY

SEQ ID NO: 98075 - protein, 23 aa, Severe acute respiratory syndrome coronavirus 2
ESGVKDCVVLHSYFTSDYYQLYS

SEQ ID NO: 98076 - protein, 23 aa, Severe acute respiratory syndrome coronavirus 2
SGVKDCVVLHSYFTSDYYQLYST

SEQ ID NO: 98077 - protein, 23 aa, Severe acute respiratory syndrome coronavirus 2
GVKDCVVLHSYFTSDYYQLYSTQ

SEQ ID NO: 98078 - protein, 24 aa, Severe acute respiratory syndrome coronavirus 2
KWESGVKDCVVLHSYFTSDYYQLY

SEQ ID NO: 98079 - protein, 24 aa, Severe acute respiratory syndrome coronavirus 2
WESGVKDCVVLHSYFTSDYYQLYS

SEQ ID NO: 98080 - protein, 24 aa, Severe acute respiratory syndrome coronavirus 2
ESGVKDCVVLHSYFTSDYYQLYST

SEQ ID NO: 98081 - protein, 24 aa, Severe acute respiratory syndrome coronavirus 2
SGVKDCVVLHSYFTSDYYQLYSTQ

SEQ ID NO: 98082 - protein, 25 aa, Severe acute respiratory syndrome coronavirus 2
KWESGVKDCVVLHSYFTSDYYQLYS

SEQ ID NO: 98083 - protein, 25 aa, Severe acute respiratory syndrome coronavirus 2
ESGVKDCVVLHSYFTSDYYQLYSTQ

SEQ ID NO: 98084 - protein, 13 aa, Severe acute respiratory syndrome coronavirus 2
LLFLVLIMLIIFW

SEQ ID NO: 98085 - protein, 14 aa, Severe acute respiratory syndrome coronavirus 2
LLFLVLIMLIIFWF

SEQ ID NO: 98086 - protein, 14 aa, Severe acute respiratory syndrome coronavirus 2
LFLVLIMLIIFWFS

SEQ ID NO: 98087 - protein, 15 aa, Severe acute respiratory syndrome coronavirus 2
LLFLVLIMLIIFWFS

SEQ ID NO: 98088 - protein, 13 aa, Severe acute respiratory syndrome coronavirus 2
SLVVRCSFYEDFL

SEQ ID NO: 98089 - protein, 13 aa, Severe acute respiratory syndrome coronavirus 2
LVVRCSFYEDFLE

SEQ ID NO: 98090 - protein, 13 aa, Severe acute respiratory syndrome coronavirus 2
VVRCSFYEDFLEY

SEQ ID NO: 98091 - protein, 13 aa, Severe acute respiratory syndrome coronavirus 2
VRCSFYEDFLEYH

SEQ ID NO: 98092 - protein, 13 aa, Severe acute respiratory syndrome coronavirus 2
RCSFYEDFLEYHD

SEQ ID NO: 98093 - protein, 14 aa, Severe acute respiratory syndrome coronavirus 2
SLVVRCSFYEDFLE

SEQ ID NO: 98094 - protein, 14 aa, Severe acute respiratory syndrome coronavirus 2
LVVRCSFYEDFLEY

SEQ ID NO: 98095 - protein, 14 aa, Severe acute respiratory syndrome coronavirus 2
VRCSFYEDFLEYHD

SEQ ID NO: 98096 - protein, 15 aa, Severe acute respiratory syndrome coronavirus 2
SLVVRCSFYEDFLEY

SEQ ID NO: 98097 - protein, 13 aa, Severe acute respiratory syndrome coronavirus 2
PLSLNMARKTLNS

SEQ ID NO: 98098 - protein, 13 aa, Severe acute respiratory syndrome coronavirus 2
LSLNMARKTLNSL

SEQ ID NO: 98099 - protein, 13 aa, Severe acute respiratory syndrome coronavirus 2
TLNSLEDKAFQLT

SEQ ID NO: 98100 - protein, 13 aa, Severe acute respiratory syndrome coronavirus 2
LNSLEDKAFQLTP

SEQ ID NO: 98101 - protein, 13 aa, Severe acute respiratory syndrome coronavirus 2
NSLEDKAFQLTPI

SEQ ID NO: 98102 - protein, 13 aa, Severe acute respiratory syndrome coronavirus 2
SLEDKAFQLTPIA

SEQ ID NO: 98103 - protein, 13 aa, Severe acute respiratory syndrome coronavirus 2
EDKAFQLTPIAVQ

SEQ ID NO: 98104 - protein, 14 aa, Severe acute respiratory syndrome coronavirus 2
PLSLNMARKTLNSL

SEQ ID NO: 98105 - protein, 14 aa, Severe acute respiratory syndrome coronavirus 2
LSLNMARKTLNSLE

SEQ ID NO: 98106 - protein, 14 aa, Severe acute respiratory syndrome coronavirus 2
SLNMARKTLNSLED

SEQ ID NO: 98107 - protein, 14 aa, Severe acute respiratory syndrome coronavirus 2
KTLNSLEDKAFQLT

SEQ ID NO: 98108 - protein, 14 aa, Severe acute respiratory syndrome coronavirus 2
TLNSLEDKAFQLTP

SEQ ID NO: 98109 - protein, 14 aa, Severe acute respiratory syndrome coronavirus 2
LNSLEDKAFQLTPI

SEQ ID NO: 98110 - protein, 14 aa, Severe acute respiratory syndrome coronavirus 2
NSLEDKAFQLTPIA

SEQ ID NO: 98111 - protein, 14 aa, Severe acute respiratory syndrome coronavirus 2
SLEDKAFQLTPIAV

SEQ ID NO: 98112 - protein, 14 aa, Severe acute respiratory syndrome coronavirus 2
LEDKAFQLTPIAVQ

SEQ ID NO: 98113 - protein, 14 aa, Severe acute respiratory syndrome coronavirus 2
KLATTEELPDEFVV

SEQ ID NO: 98114 - protein, 14 aa, Severe acute respiratory syndrome coronavirus 2
LATTEELPDEFVVV

SEQ ID NO: 98115 - protein, 15 aa, Severe acute respiratory syndrome coronavirus 2
PLSLNMARKTLNSLE

SEQ ID NO: 98116 - protein, 15 aa, Severe acute respiratory syndrome coronavirus 2
LSLNMARKTLNSLED

SEQ ID NO: 98117 - protein, 15 aa, Severe acute respiratory syndrome coronavirus 2
SLNMARKTLNSLEDK

SEQ ID NO: 98118 - protein, 15 aa, Severe acute respiratory syndrome coronavirus 2
LNMARKTLNSLEDKA

SEQ ID NO: 98119 - protein, 15 aa, Severe acute respiratory syndrome coronavirus 2
ARKTLNSLEDKAFQL

SEQ ID NO: 98120 - protein, 15 aa, Severe acute respiratory syndrome coronavirus 2
RKTLNSLEDKAFQLT

SEQ ID NO: 98121 - protein, 15 aa, Severe acute respiratory syndrome coronavirus 2
KTLNSLEDKAFQLTP

SEQ ID NO: 98122 - protein, 15 aa, Severe acute respiratory syndrome coronavirus 2
TLNSLEDKAFQLTPI

SEQ ID NO: 98123 - protein, 15 aa, Severe acute respiratory syndrome coronavirus 2
LNSLEDKAFQLTPIA

SEQ ID NO: 98124 - protein, 15 aa, Severe acute respiratory syndrome coronavirus 2
NSLEDKAFQLTPIAV

SEQ ID NO: 98125 - protein, 15 aa, Severe acute respiratory syndrome coronavirus 2
SLEDKAFQLTPIAVQ

SEQ ID NO: 98126 - protein, 15 aa, Severe acute respiratory syndrome coronavirus 2
KLATTEELPDEFVVV

SEQ ID NO: 98127 - protein, 16 aa, Severe acute respiratory syndrome coronavirus 2
PLSLNMARKTLNSLED

SEQ ID NO: 98128 - protein, 16 aa, Severe acute respiratory syndrome coronavirus 2
LSLNMARKTLNSLEDK

SEQ ID NO: 98129 - protein, 16 aa, Severe acute respiratory syndrome coronavirus 2
SLNMARKTLNSLEDKA

SEQ ID NO: 98130 - protein, 16 aa, Severe acute respiratory syndrome coronavirus 2
LNMARKTLNSLEDKAF

SEQ ID NO: 98131 - protein, 16 aa, Severe acute respiratory syndrome coronavirus 2
MARKTLNSLEDKAFQL

SEQ ID NO: 98132 - protein, 16 aa, Severe acute respiratory syndrome coronavirus 2
ARKTLNSLEDKAFQLT

SEQ ID NO: 98133 - protein, 16 aa, Severe acute respiratory syndrome coronavirus 2
RKTLNSLEDKAFQLTP

SEQ ID NO: 98134 - protein, 16 aa, Severe acute respiratory syndrome coronavirus 2
KTLNSLEDKAFQLTPI

SEQ ID NO: 98135 - protein, 16 aa, Severe acute respiratory syndrome coronavirus 2
TLNSLEDKAFQLTPIA

SEQ ID NO: 98136 - protein, 16 aa, Severe acute respiratory syndrome coronavirus 2
LNSLEDKAFQLTPIAV

SEQ ID NO: 98137 - protein, 16 aa, Severe acute respiratory syndrome coronavirus 2
NSLEDKAFQLTPIAVQ

SEQ ID NO: 98138 - protein, 17 aa, Severe acute respiratory syndrome coronavirus 2
PLSLNMARKTLNSLEDK

SEQ ID NO: 98139 - protein, 17 aa, Severe acute respiratory syndrome coronavirus 2
LSLNMARKTLNSLEDKA

SEQ ID NO: 98140 - protein, 17 aa, Severe acute respiratory syndrome coronavirus 2
SLNMARKTLNSLEDKAF

SEQ ID NO: 98141 - protein, 17 aa, Severe acute respiratory syndrome coronavirus 2
LNMARKTLNSLEDKAFQ

SEQ ID NO: 98142 - protein, 17 aa, Severe acute respiratory syndrome coronavirus 2
NMARKTLNSLEDKAFQL

SEQ ID NO: 98143 - protein, 17 aa, Severe acute respiratory syndrome coronavirus 2
MARKTLNSLEDKAFQLT

SEQ ID NO: 98144 - protein, 17 aa, Severe acute respiratory syndrome coronavirus 2
ARKTLNSLEDKAFQLTP

SEQ ID NO: 98145 - protein, 17 aa, Severe acute respiratory syndrome coronavirus 2
RKTLNSLEDKAFQLTPI

SEQ ID NO: 98146 - protein, 17 aa, Severe acute respiratory syndrome coronavirus 2
KTLNSLEDKAFQLTPIA

SEQ ID NO: 98147 - protein, 17 aa, Severe acute respiratory syndrome coronavirus 2
TLNSLEDKAFQLTPIAV

SEQ ID NO: 98148 - protein, 17 aa, Severe acute respiratory syndrome coronavirus 2
LNSLEDKAFQLTPIAVQ

SEQ ID NO: 98149 - protein, 18 aa, Severe acute respiratory syndrome coronavirus 2
PLSLNMARKTLNSLEDKA

SEQ ID NO: 98150 - protein, 18 aa, Severe acute respiratory syndrome coronavirus 2
MARKTLNSLEDKAFQLTP

SEQ ID NO: 98151 - protein, 18 aa, Severe acute respiratory syndrome coronavirus 2
ARKTLNSLEDKAFQLTPI

SEQ ID NO: 98152 - protein, 18 aa, Severe acute respiratory syndrome coronavirus 2
RKTLNSLEDKAFQLTPIA

SEQ ID NO: 98153 - protein, 18 aa, Severe acute respiratory syndrome coronavirus 2
KTLNSLEDKAFQLTPIAV

SEQ ID NO: 98154 - protein, 18 aa, Severe acute respiratory syndrome coronavirus 2
TLNSLEDKAFQLTPIAVQ

SEQ ID NO: 98155 - protein, 19 aa, Severe acute respiratory syndrome coronavirus 2
PLSLNMARKTLNSLEDKAF

SEQ ID NO: 98156 - protein, 19 aa, Severe acute respiratory syndrome coronavirus 2
LSLNMARKTLNSLEDKAFQ

SEQ ID NO: 98157 - protein, 19 aa, Severe acute respiratory syndrome coronavirus 2
SLNMARKTLNSLEDKAFQL

SEQ ID NO: 98158 - protein, 19 aa, Severe acute respiratory syndrome coronavirus 2
LNMARKTLNSLEDKAFQLT

SEQ ID NO: 98159 - protein, 19 aa, Severe acute respiratory syndrome coronavirus 2
NMARKTLNSLEDKAFQLTP

SEQ ID NO: 98160 - protein, 19 aa, Severe acute respiratory syndrome coronavirus 2
MARKTLNSLEDKAFQLTPI

SEQ ID NO: 98161 - protein, 19 aa, Severe acute respiratory syndrome coronavirus 2
ARKTLNSLEDKAFQLTPIA

SEQ ID NO: 98162 - protein, 19 aa, Severe acute respiratory syndrome coronavirus 2
RKTLNSLEDKAFQLTPIAV

SEQ ID NO: 98163 - protein, 19 aa, Severe acute respiratory syndrome coronavirus 2
KTLNSLEDKAFQLTPIAVQ

SEQ ID NO: 98164 - protein, 20 aa, Severe acute respiratory syndrome coronavirus 2
PLSLNMARKTLNSLEDKAFQ

SEQ ID NO: 98165 - protein, 20 aa, Severe acute respiratory syndrome coronavirus 2
LSLNMARKTLNSLEDKAFQL

SEQ ID NO: 98166 - protein, 20 aa, Severe acute respiratory syndrome coronavirus 2
SLNMARKTLNSLEDKAFQLT

SEQ ID NO: 98167 - protein, 20 aa, Severe acute respiratory syndrome coronavirus 2
LNMARKTLNSLEDKAFQLTP

SEQ ID NO: 98168 - protein, 20 aa, Severe acute respiratory syndrome coronavirus 2
NMARKTLNSLEDKAFQLTPI

SEQ ID NO: 98169 - protein, 20 aa, Severe acute respiratory syndrome coronavirus 2
MARKTLNSLEDKAFQLTPIA

SEQ ID NO: 98170 - protein, 20 aa, Severe acute respiratory syndrome coronavirus 2
ARKTLNSLEDKAFQLTPIAV

SEQ ID NO: 98171 - protein, 20 aa, Severe acute respiratory syndrome coronavirus 2
RKTLNSLEDKAFQLTPIAVQ

SEQ ID NO: 98172 - protein, 21 aa, Severe acute respiratory syndrome coronavirus 2
PLSLNMARKTLNSLEDKAFQL

SEQ ID NO: 98173 - protein, 21 aa, Severe acute respiratory syndrome coronavirus 2
LSLNMARKTLNSLEDKAFQLT

SEQ ID NO: 98174 - protein, 21 aa, Severe acute respiratory syndrome coronavirus 2
SLNMARKTLNSLEDKAFQLTP

SEQ ID NO: 98175 - protein, 21 aa, Severe acute respiratory syndrome coronavirus 2
LNMARKTLNSLEDKAFQLTPI

SEQ ID NO: 98176 - protein, 21 aa, Severe acute respiratory syndrome coronavirus 2
NMARKTLNSLEDKAFQLTPIA

SEQ ID NO: 98177 - protein, 21 aa, Severe acute respiratory syndrome coronavirus 2
MARKTLNSLEDKAFQLTPIAV

SEQ ID NO: 98178 - protein, 21 aa, Severe acute respiratory syndrome coronavirus 2
ARKTLNSLEDKAFQLTPIAVQ

SEQ ID NO: 98179 - protein, 22 aa, Severe acute respiratory syndrome coronavirus 2
PLSLNMARKTLNSLEDKAFQLT

SEQ ID NO: 98180 - protein, 22 aa, Severe acute respiratory syndrome coronavirus 2
LSLNMARKTLNSLEDKAFQLTP

SEQ ID NO: 98181 - protein, 22 aa, Severe acute respiratory syndrome coronavirus 2
SLNMARKTLNSLEDKAFQLTPI

SEQ ID NO: 98182 - protein, 22 aa, Severe acute respiratory syndrome coronavirus 2
LNMARKTLNSLEDKAFQLTPIA

SEQ ID NO: 98183 - protein, 22 aa, Severe acute respiratory syndrome coronavirus 2
NMARKTLNSLEDKAFQLTPIAV

SEQ ID NO: 98184 - protein, 22 aa, Severe acute respiratory syndrome coronavirus 2
MARKTLNSLEDKAFQLTPIAVQ

SEQ ID NO: 98185 - protein, 23 aa, Severe acute respiratory syndrome coronavirus 2
PLSLNMARKTLNSLEDKAFQLTP

SEQ ID NO: 98186 - protein, 23 aa, Severe acute respiratory syndrome coronavirus 2
LSLNMARKTLNSLEDKAFQLTPI

SEQ ID NO: 98187 - protein, 23 aa, Severe acute respiratory syndrome coronavirus 2
SLNMARKTLNSLEDKAFQLTPIA

SEQ ID NO: 98188 - protein, 23 aa, Severe acute respiratory syndrome coronavirus 2
LNMARKTLNSLEDKAFQLTPIAV

SEQ ID NO: 98189 - protein, 23 aa, Severe acute respiratory syndrome coronavirus 2
NMARKTLNSLEDKAFQLTPIAVQ

SEQ ID NO: 98190 - protein, 24 aa, Severe acute respiratory syndrome coronavirus 2
PLSLNMARKTLNSLEDKAFQLTPI

SEQ ID NO: 98191 - protein, 24 aa, Severe acute respiratory syndrome coronavirus 2
LSLNMARKTLNSLEDKAFQLTPIA

SEQ ID NO: 98192 - protein, 24 aa, Severe acute respiratory syndrome coronavirus 2
SLNMARKTLNSLEDKAFQLTPIAV

SEQ ID NO: 98193 - protein, 24 aa, Severe acute respiratory syndrome coronavirus 2
LNMARKTLNSLEDKAFQLTPIAVQ

SEQ ID NO: 98194 - protein, 25 aa, Severe acute respiratory syndrome coronavirus 2
PLSLNMARKTLNSLEDKAFQLTPIA

SEQ ID NO: 98195 - protein, 25 aa, Severe acute respiratory syndrome coronavirus 2
LSLNMARKTLNSLEDKAFQLTPIAV

SEQ ID NO: 98196 - protein, 25 aa, Severe acute respiratory syndrome coronavirus 2
SLNMARKTLNSLEDKAFQLTPIAVQ

SEQ ID NO: 98197 - protein, 13 aa, Severe acute respiratory syndrome coronavirus 2
TRGVYYPDKVFRS

SEQ ID NO: 98198 - protein, 13 aa, Severe acute respiratory syndrome coronavirus 2
NIIRGWIFGTTLD

SEQ ID NO: 98199 - protein, 13 aa, Severe acute respiratory syndrome coronavirus 2
IIRGWIFGTTLDS

SEQ ID NO: 98200 - protein, 13 aa, Severe acute respiratory syndrome coronavirus 2
IRGWIFGTTLDSK

SEQ ID NO: 98201 - protein, 13 aa, Severe acute respiratory syndrome coronavirus 2
RGWIFGTTLDSKT

SEQ ID NO: 98202 - protein, 13 aa, Severe acute respiratory syndrome coronavirus 2
FKNLREFVFKNID

SEQ ID NO: 98203 - protein, 13 aa, Severe acute respiratory syndrome coronavirus 2
KNLREFVFKNIDG

SEQ ID NO: 98204 - protein, 13 aa, Severe acute respiratory syndrome coronavirus 2
NLREFVFKNIDGY

SEQ ID NO: 98205 - protein, 13 aa, Severe acute respiratory syndrome coronavirus 2
LREFVFKNIDGYF

SEQ ID NO: 98206 - protein, 13 aa, Severe acute respiratory syndrome coronavirus 2
REFVFKNIDGYFK

SEQ ID NO: 98207 - protein, 13 aa, Severe acute respiratory syndrome coronavirus 2
EFVFKNIDGYFKI

SEQ ID NO: 98208 - protein, 13 aa, Severe acute respiratory syndrome coronavirus 2
FVFKNIDGYFKIY

SEQ ID NO: 98209 - protein, 13 aa, Severe acute respiratory syndrome coronavirus 2
IDGYFKIYSKHTP

SEQ ID NO: 98210 - protein, 13 aa, Severe acute respiratory syndrome coronavirus 2
DGYFKIYSKHTPI

SEQ ID NO: 98211 - protein, 13 aa, Severe acute respiratory syndrome coronavirus 2
YFKIYSKHTPINL

SEQ ID NO: 98212 - protein, 13 aa, Severe acute respiratory syndrome coronavirus 2
FKIYSKHTPINLV

SEQ ID NO: 98213 - protein, 13 aa, Severe acute respiratory syndrome coronavirus 2
KIYSKHTPINLVR

SEQ ID NO: 98214 - protein, 13 aa, Severe acute respiratory syndrome coronavirus 2
LPQGFSALEPLVD

SEQ ID NO: 98215 - protein, 13 aa, Severe acute respiratory syndrome coronavirus 2
PQGFSALEPLVDL

SEQ ID NO: 98216 - protein, 13 aa, Severe acute respiratory syndrome coronavirus 2
QGFSALEPLVDLP

SEQ ID NO: 98217 - protein, 13 aa, Severe acute respiratory syndrome coronavirus 2
GFSALEPLVDLPI

SEQ ID NO: 98218 - protein, 13 aa, Severe acute respiratory syndrome coronavirus 2
FSALEPLVDLPIG

SEQ ID NO: 98219 - protein, 13 aa, Severe acute respiratory syndrome coronavirus 2
SALEPLVDLPIGI

SEQ ID NO: 98220 - protein, 13 aa, Severe acute respiratory syndrome coronavirus 2
YYVGYLQPRTFLL

SEQ ID NO: 98221 - protein, 13 aa, Severe acute respiratory syndrome coronavirus 2
YVGYLQPRTFLLK

SEQ ID NO: 98222 - protein, 13 aa, Severe acute respiratory syndrome coronavirus 2
VGYLQPRTFLLKY

SEQ ID NO: 98223 - protein, 13 aa, Severe acute respiratory syndrome coronavirus 2
GYLQPRTFLLKYN

SEQ ID NO: 98224 - protein, 13 aa, Severe acute respiratory syndrome coronavirus 2
GIYQTSNFRVQPT

SEQ ID NO: 98225 - protein, 13 aa, Severe acute respiratory syndrome coronavirus 2
IYQTSNFRVQPTE

SEQ ID NO: 98226 - protein, 13 aa, Severe acute respiratory syndrome coronavirus 2
TSNFRVQPTESIV

SEQ ID NO: 98227 - protein, 13 aa, Severe acute respiratory syndrome coronavirus 2
SNFRVQPTESIVR

SEQ ID NO: 98228 - protein, 13 aa, Severe acute respiratory syndrome coronavirus 2
NFRVQPTESIVRF

SEQ ID NO: 98229 - protein, 13 aa, Severe acute respiratory syndrome coronavirus 2
TRFASVYAWNRKR

SEQ ID NO: 98230 - protein, 13 aa, Severe acute respiratory syndrome coronavirus 2
RFASVYAWNRKRI

SEQ ID NO: 98231 - protein, 13 aa, Severe acute respiratory syndrome coronavirus 2
FASVYAWNRKRIS

SEQ ID NO: 98232 - protein, 13 aa, Severe acute respiratory syndrome coronavirus 2
ASVYAWNRKRISN

SEQ ID NO: 98233 - protein, 13 aa, Severe acute respiratory syndrome coronavirus 2
SVYAWNRKRISNC

SEQ ID NO: 98234 - protein, 13 aa, Severe acute respiratory syndrome coronavirus 2
LYNSASFSTFKCY

SEQ ID NO: 98235 - protein, 13 aa, Severe acute respiratory syndrome coronavirus 2
TKLNDLCFTNVYA

SEQ ID NO: 98236 - protein, 13 aa, Severe acute respiratory syndrome coronavirus 2
NDLCFTNVYADSF

SEQ ID NO: 98237 - protein, 13 aa, Severe acute respiratory syndrome coronavirus 2
DLCFTNVYADSFV

SEQ ID NO: 98238 - protein, 13 aa, Severe acute respiratory syndrome coronavirus 2
LCFTNVYADSFVI

SEQ ID NO: 98239 - protein, 13 aa, Severe acute respiratory syndrome coronavirus 2
CFTNVYADSFVIR

SEQ ID NO: 98240 - protein, 13 aa, Severe acute respiratory syndrome coronavirus 2
FTNVYADSFVIRG

SEQ ID NO: 98241 - protein, 13 aa, Severe acute respiratory syndrome coronavirus 2
SFVIRGDEVRQIA

SEQ ID NO: 98242 - protein, 13 aa, Severe acute respiratory syndrome coronavirus 2
FVIRGDEVRQIAP

SEQ ID NO: 98243 - protein, 13 aa, Severe acute respiratory syndrome coronavirus 2
VRQIAPGQTGKIA

SEQ ID NO: 98244 - protein, 13 aa, Severe acute respiratory syndrome coronavirus 2
PDDFTGCVIAWNS

SEQ ID NO: 98245 - protein, 13 aa, Severe acute respiratory syndrome coronavirus 2
DDFTGCVIAWNSN

SEQ ID NO: 98246 - protein, 13 aa, Severe acute respiratory syndrome coronavirus 2
FTGCVIAWNSNNL

SEQ ID NO: 98247 - protein, 13 aa, Severe acute respiratory syndrome coronavirus 2
TGCVIAWNSNNLD

SEQ ID NO: 98248 - protein, 13 aa, Severe acute respiratory syndrome coronavirus 2
GCVIAWNSNNLDS

SEQ ID NO: 98249 - protein, 13 aa, Severe acute respiratory syndrome coronavirus 2
CVIAWNSNNLDSK

SEQ ID NO: 98250 - protein, 13 aa, Severe acute respiratory syndrome coronavirus 2
VIAWNSNNLDSKV

SEQ ID NO: 98251 - protein, 13 aa, Severe acute respiratory syndrome coronavirus 2
GGNYNYLYRLFRK

SEQ ID NO: 98252 - protein, 13 aa, Severe acute respiratory syndrome coronavirus 2
GNYNYLYRLFRKS

SEQ ID NO: 98253 - protein, 13 aa, Severe acute respiratory syndrome coronavirus 2
NYNYLYRLFRKSN

SEQ ID NO: 98254 - protein, 13 aa, Severe acute respiratory syndrome coronavirus 2
YNYLYRLFRKSNL

SEQ ID NO: 98255 - protein, 13 aa, Severe acute respiratory syndrome coronavirus 2
NYLYRLFRKSNLK

SEQ ID NO: 98256 - protein, 13 aa, Severe acute respiratory syndrome coronavirus 2
YLYRLFRKSNLKP

SEQ ID NO: 98257 - protein, 13 aa, Severe acute respiratory syndrome coronavirus 2
LYRLFRKSNLKPF

SEQ ID NO: 98258 - protein, 13 aa, Severe acute respiratory syndrome coronavirus 2
YRLFRKSNLKPFE

SEQ ID NO: 98259 - protein, 13 aa, Severe acute respiratory syndrome coronavirus 2
SYGFQPTNGVGYQ

SEQ ID NO: 98260 - protein, 13 aa, Severe acute respiratory syndrome coronavirus 2
NGVGYQPYRVVVL

SEQ ID NO: 98261 - protein, 13 aa, Severe acute respiratory syndrome coronavirus 2
GVGYQPYRVVVLS

SEQ ID NO: 98262 - protein, 13 aa, Severe acute respiratory syndrome coronavirus 2
VGYQPYRVVVLSF

SEQ ID NO: 98263 - protein, 13 aa, Severe acute respiratory syndrome coronavirus 2
GYQPYRVVVLSFE

SEQ ID NO: 98264 - protein, 13 aa, Severe acute respiratory syndrome coronavirus 2
YQPYRVVVLSFEL

SEQ ID NO: 98265 - protein, 13 aa, Severe acute respiratory syndrome coronavirus 2
QPYRVVVLSFELL

SEQ ID NO: 98266 - protein, 13 aa, Severe acute respiratory syndrome coronavirus 2
PYRVVVLSFELLH

SEQ ID NO: 98267 - protein, 13 aa, Severe acute respiratory syndrome coronavirus 2
KSTNLVKNKCVNF

SEQ ID NO: 98268 - protein, 13 aa, Severe acute respiratory syndrome coronavirus 2
STNLVKNKCVNFN

SEQ ID NO: 98269 - protein, 13 aa, Severe acute respiratory syndrome coronavirus 2
TNLVKNKCVNFNF

SEQ ID NO: 98270 - protein, 13 aa, Severe acute respiratory syndrome coronavirus 2
NLVKNKCVNFNFN

SEQ ID NO: 98271 - protein, 13 aa, Severe acute respiratory syndrome coronavirus 2
VKNKCVNFNFNGL

SEQ ID NO: 98272 - protein, 13 aa, Severe acute respiratory syndrome coronavirus 2
KNKCVNFNFNGLT

SEQ ID NO: 98273 - protein, 13 aa, Severe acute respiratory syndrome coronavirus 2
NKCVNFNFNGLTG

SEQ ID NO: 98274 - protein, 13 aa, Severe acute respiratory syndrome coronavirus 2
VNFNFNGLTGTGV

SEQ ID NO: 98275 - protein, 13 aa, Severe acute respiratory syndrome coronavirus 2
NFNFNGLTGTGVL

SEQ ID NO: 98276 - protein, 13 aa, Severe acute respiratory syndrome coronavirus 2
FNFNGLTGTGVLT

SEQ ID NO: 98277 - protein, 13 aa, Severe acute respiratory syndrome coronavirus 2
NFNGLTGTGVLTE

SEQ ID NO: 98278 - protein, 13 aa, Severe acute respiratory syndrome coronavirus 2
FNGLTGTGVLTES

SEQ ID NO: 98279 - protein, 13 aa, Severe acute respiratory syndrome coronavirus 2
TESNKKFLPFQQF

SEQ ID NO: 98280 - protein, 13 aa, Severe acute respiratory syndrome coronavirus 2
ESNKKFLPFQQFG

SEQ ID NO: 98281 - protein, 13 aa, Severe acute respiratory syndrome coronavirus 2
SNKKFLPFQQFGR

SEQ ID NO: 98282 - protein, 13 aa, Severe acute respiratory syndrome coronavirus 2
QTLEILDITPCSF

SEQ ID NO: 98283 - protein, 13 aa, Severe acute respiratory syndrome coronavirus 2
ITPCSFGGVSVIT

SEQ ID NO: 98284 - protein, 13 aa, Severe acute respiratory syndrome coronavirus 2
TPCSFGGVSVITP

SEQ ID NO: 98285 - protein, 13 aa, Severe acute respiratory syndrome coronavirus 2
PCSFGGVSVITPG

SEQ ID NO: 98286 - protein, 13 aa, Severe acute respiratory syndrome coronavirus 2
CSFGGVSVITPGT

SEQ ID NO: 98287 - protein, 13 aa, Severe acute respiratory syndrome coronavirus 2
PTWRVYSTGSNVF

SEQ ID NO: 98288 - protein, 13 aa, Severe acute respiratory syndrome coronavirus 2
TWRVYSTGSNVFQ

SEQ ID NO: 98289 - protein, 13 aa, Severe acute respiratory syndrome coronavirus 2
WRVYSTGSNVFQT

SEQ ID NO: 98290 - protein, 13 aa, Severe acute respiratory syndrome coronavirus 2
RVYSTGSNVFQTR

SEQ ID NO: 98291 - protein, 13 aa, Severe acute respiratory syndrome coronavirus 2
VYSTGSNVFQTRA

SEQ ID NO: 98292 - protein, 13 aa, Severe acute respiratory syndrome coronavirus 2
YSTGSNVFQTRAG

SEQ ID NO: 98293 - protein, 13 aa, Severe acute respiratory syndrome coronavirus 2
GSNVFQTRAGCLI

SEQ ID NO: 98294 - protein, 13 aa, Severe acute respiratory syndrome coronavirus 2
SNVFQTRAGCLIG

SEQ ID NO: 98295 - protein, 13 aa, Severe acute respiratory syndrome coronavirus 2
NVFQTRAGCLIGA

SEQ ID NO: 98296 - protein, 13 aa, Severe acute respiratory syndrome coronavirus 2
ECDIPIGAGICAS

SEQ ID NO: 98297 - protein, 13 aa, Severe acute respiratory syndrome coronavirus 2
CDIPIGAGICASY

SEQ ID NO: 98298 - protein, 13 aa, Severe acute respiratory syndrome coronavirus 2
FTISVTTEILPVS

SEQ ID NO: 98299 - protein, 13 aa, Severe acute respiratory syndrome coronavirus 2
CSNLLLQYGSFCT

SEQ ID NO: 98300 - protein, 13 aa, Severe acute respiratory syndrome coronavirus 2
SNLLLQYGSFCTQ

SEQ ID NO: 98301 - protein, 13 aa, Severe acute respiratory syndrome coronavirus 2
NLLLQYGSFCTQL

SEQ ID NO: 98302 - protein, 13 aa, Severe acute respiratory syndrome coronavirus 2
LLLQYGSFCTQLN

SEQ ID NO: 98303 - protein, 13 aa, Severe acute respiratory syndrome coronavirus 2
TDEMIAQYTSALL

SEQ ID NO: 98304 - protein, 13 aa, Severe acute respiratory syndrome coronavirus 2
GWTFGAGAALQIP

SEQ ID NO: 98305 - protein, 13 aa, Severe acute respiratory syndrome coronavirus 2
WTFGAGAALQIPF

SEQ ID NO: 98306 - protein, 13 aa, Severe acute respiratory syndrome coronavirus 2
TFGAGAALQIPFA

SEQ ID NO: 98307 - protein, 13 aa, Severe acute respiratory syndrome coronavirus 2
FGAGAALQIPFAM

SEQ ID NO: 98308 - protein, 13 aa, Severe acute respiratory syndrome coronavirus 2
GAALQIPFAMQMA

SEQ ID NO: 98309 - protein, 13 aa, Severe acute respiratory syndrome coronavirus 2
AALQIPFAMQMAY

SEQ ID NO: 98310 - protein, 13 aa, Severe acute respiratory syndrome coronavirus 2
ALQIPFAMQMAYR

SEQ ID NO: 98311 - protein, 13 aa, Severe acute respiratory syndrome coronavirus 2
LQIPFAMQMAYRF

SEQ ID NO: 98312 - protein, 13 aa, Severe acute respiratory syndrome coronavirus 2
QIPFAMQMAYRFN

SEQ ID NO: 98313 - protein, 13 aa, Severe acute respiratory syndrome coronavirus 2
IPFAMQMAYRFNG

SEQ ID NO: 98314 - protein, 13 aa, Severe acute respiratory syndrome coronavirus 2
PFAMQMAYRFNGI

SEQ ID NO: 98315 - protein, 13 aa, Severe acute respiratory syndrome coronavirus 2
FAMQMAYRFNGIG

SEQ ID NO: 98316 - protein, 13 aa, Severe acute respiratory syndrome coronavirus 2
AMQMAYRFNGIGV

SEQ ID NO: 98317 - protein, 13 aa, Severe acute respiratory syndrome coronavirus 2
MAYRFNGIGVTQN

SEQ ID NO: 98318 - protein, 13 aa, Severe acute respiratory syndrome coronavirus 2
AYRFNGIGVTQNV

SEQ ID NO: 98319 - protein, 13 aa, Severe acute respiratory syndrome coronavirus 2
YRFNGIGVTQNVL

SEQ ID NO: 98320 - protein, 13 aa, Severe acute respiratory syndrome coronavirus 2
RFNGIGVTQNVLY

SEQ ID NO: 98321 - protein, 13 aa, Severe acute respiratory syndrome coronavirus 2
GVTQNVLYENQKL

SEQ ID NO: 98322 - protein, 13 aa, Severe acute respiratory syndrome coronavirus 2
VTQNVLYENQKLI

SEQ ID NO: 98323 - protein, 13 aa, Severe acute respiratory syndrome coronavirus 2
TQNVLYENQKLIA

SEQ ID NO: 98324 - protein, 13 aa, Severe acute respiratory syndrome coronavirus 2
QNVLYENQKLIAN

SEQ ID NO: 98325 - protein, 13 aa, Severe acute respiratory syndrome coronavirus 2
VLYENQKLIANQF

SEQ ID NO: 98326 - protein, 13 aa, Severe acute respiratory syndrome coronavirus 2
LVKQLSSNFGAIS

SEQ ID NO: 98327 - protein, 13 aa, Severe acute respiratory syndrome coronavirus 2
VKQLSSNFGAISS

SEQ ID NO: 98328 - protein, 13 aa, Severe acute respiratory syndrome coronavirus 2
KQLSSNFGAISSV

SEQ ID NO: 98329 - protein, 13 aa, Severe acute respiratory syndrome coronavirus 2
QLSSNFGAISSVL

SEQ ID NO: 98330 - protein, 13 aa, Severe acute respiratory syndrome coronavirus 2
LSSNFGAISSVLN

SEQ ID NO: 98331 - protein, 13 aa, Severe acute respiratory syndrome coronavirus 2
SSNFGAISSVLND

SEQ ID NO: 98332 - protein, 13 aa, Severe acute respiratory syndrome coronavirus 2
SNFGAISSVLNDI

SEQ ID NO: 98333 - protein, 13 aa, Severe acute respiratory syndrome coronavirus 2
NFGAISSVLNDIL

SEQ ID NO: 98334 - protein, 13 aa, Severe acute respiratory syndrome coronavirus 2
FGAISSVLNDILS

SEQ ID NO: 98335 - protein, 13 aa, Severe acute respiratory syndrome coronavirus 2
GAISSVLNDILSR

SEQ ID NO: 98336 - protein, 13 aa, Severe acute respiratory syndrome coronavirus 2
AISSVLNDILSRL

SEQ ID NO: 98337 - protein, 13 aa, Severe acute respiratory syndrome coronavirus 2
ISSVLNDILSRLD

SEQ ID NO: 98338 - protein, 13 aa, Severe acute respiratory syndrome coronavirus 2
VQIDRLITGRLQS

SEQ ID NO: 98339 - protein, 13 aa, Severe acute respiratory syndrome coronavirus 2
QIDRLITGRLQSL

SEQ ID NO: 98340 - protein, 13 aa, Severe acute respiratory syndrome coronavirus 2
IDRLITGRLQSLQ

SEQ ID NO: 98341 - protein, 13 aa, Severe acute respiratory syndrome coronavirus 2
DRLITGRLQSLQT

SEQ ID NO: 98342 - protein, 13 aa, Severe acute respiratory syndrome coronavirus 2
RLITGRLQSLQTY

SEQ ID NO: 98343 - protein, 13 aa, Severe acute respiratory syndrome coronavirus 2
ITGRLQSLQTYVT

SEQ ID NO: 98344 - protein, 13 aa, Severe acute respiratory syndrome coronavirus 2
TGRLQSLQTYVTQ

SEQ ID NO: 98345 - protein, 13 aa, Severe acute respiratory syndrome coronavirus 2
GRLQSLQTYVTQQ

SEQ ID NO: 98346 - protein, 13 aa, Severe acute respiratory syndrome coronavirus 2
RLQSLQTYVTQQL

SEQ ID NO: 98347 - protein, 13 aa, Severe acute respiratory syndrome coronavirus 2
LQSLQTYVTQQLI

SEQ ID NO: 98348 - protein, 13 aa, Severe acute respiratory syndrome coronavirus 2
QSLQTYVTQQLIR

SEQ ID NO: 98349 - protein, 13 aa, Severe acute respiratory syndrome coronavirus 2
SLQTYVTQQLIRA

SEQ ID NO: 98350 - protein, 13 aa, Severe acute respiratory syndrome coronavirus 2
LQTYVTQQLIRAA

SEQ ID NO: 98351 - protein, 13 aa, Severe acute respiratory syndrome coronavirus 2
QTYVTQQLIRAAE

SEQ ID NO: 98352 - protein, 13 aa, Severe acute respiratory syndrome coronavirus 2
TYVTQQLIRAAEI

SEQ ID NO: 98353 - protein, 13 aa, Severe acute respiratory syndrome coronavirus 2
YVTQQLIRAAEIR

SEQ ID NO: 98354 - protein, 13 aa, Severe acute respiratory syndrome coronavirus 2
CGKGYHLMSFPQS

SEQ ID NO: 98355 - protein, 13 aa, Severe acute respiratory syndrome coronavirus 2
GKGYHLMSFPQSA

SEQ ID NO: 98356 - protein, 13 aa, Severe acute respiratory syndrome coronavirus 2
KGYHLMSFPQSAP

SEQ ID NO: 98357 - protein, 13 aa, Severe acute respiratory syndrome coronavirus 2
GYHLMSFPQSAPH

SEQ ID NO: 98358 - protein, 13 aa, Severe acute respiratory syndrome coronavirus 2
PQSAPHGVVFLHV

SEQ ID NO: 98359 - protein, 13 aa, Severe acute respiratory syndrome coronavirus 2
QSAPHGVVFLHVT

SEQ ID NO: 98360 - protein, 13 aa, Severe acute respiratory syndrome coronavirus 2
SAPHGVVFLHVTY

SEQ ID NO: 98361 - protein, 13 aa, Severe acute respiratory syndrome coronavirus 2
APHGVVFLHVTYV

SEQ ID NO: 98362 - protein, 13 aa, Severe acute respiratory syndrome coronavirus 2
PHGVVFLHVTYVP

SEQ ID NO: 98363 - protein, 13 aa, Severe acute respiratory syndrome coronavirus 2
HGVVFLHVTYVPA

SEQ ID NO: 98364 - protein, 13 aa, Severe acute respiratory syndrome coronavirus 2
GVVFLHVTYVPAQ

SEQ ID NO: 98365 - protein, 13 aa, Severe acute respiratory syndrome coronavirus 2
VVFLHVTYVPAQE

SEQ ID NO: 98366 - protein, 13 aa, Severe acute respiratory syndrome coronavirus 2
VFLHVTYVPAQEK

SEQ ID NO: 98367 - protein, 13 aa, Severe acute respiratory syndrome coronavirus 2
WFVTQRNFYEPQI

SEQ ID NO: 98368 - protein, 14 aa, Severe acute respiratory syndrome coronavirus 2
NIIRGWIFGTTLDS

SEQ ID NO: 98369 - protein, 14 aa, Severe acute respiratory syndrome coronavirus 2
IIRGWIFGTTLDSK

SEQ ID NO: 98370 - protein, 14 aa, Severe acute respiratory syndrome coronavirus 2
IRGWIFGTTLDSKT

SEQ ID NO: 98371 - protein, 14 aa, Severe acute respiratory syndrome coronavirus 2
RGWIFGTTLDSKTQ

SEQ ID NO: 98372 - protein, 14 aa, Severe acute respiratory syndrome coronavirus 2
GWIFGTTLDSKTQS

SEQ ID NO: 98373 - protein, 14 aa, Severe acute respiratory syndrome coronavirus 2
FGTTLDSKTQSLLI

SEQ ID NO: 98374 - protein, 14 aa, Severe acute respiratory syndrome coronavirus 2
ATNVVIKVCEFQFC

SEQ ID NO: 98375 - protein, 14 aa, Severe acute respiratory syndrome coronavirus 2
TNVVIKVCEFQFCN

SEQ ID NO: 98376 - protein, 14 aa, Severe acute respiratory syndrome coronavirus 2
FKNLREFVFKNIDG

SEQ ID NO: 98377 - protein, 14 aa, Severe acute respiratory syndrome coronavirus 2
KNLREFVFKNIDGY

SEQ ID NO: 98378 - protein, 14 aa, Severe acute respiratory syndrome coronavirus 2
NLREFVFKNIDGYF

SEQ ID NO: 98379 - protein, 14 aa, Severe acute respiratory syndrome coronavirus 2
LREFVFKNIDGYFK

SEQ ID NO: 98380 - protein, 14 aa, Severe acute respiratory syndrome coronavirus 2
REFVFKNIDGYFKI

SEQ ID NO: 98381 - protein, 14 aa, Severe acute respiratory syndrome coronavirus 2
EFVFKNIDGYFKIY

SEQ ID NO: 98382 - protein, 14 aa, Severe acute respiratory syndrome coronavirus 2
FVFKNIDGYFKIYS

SEQ ID NO: 98383 - protein, 14 aa, Severe acute respiratory syndrome coronavirus 2
VFKNIDGYFKIYSK

SEQ ID NO: 98384 - protein, 14 aa, Severe acute respiratory syndrome coronavirus 2
FKNIDGYFKIYSKH

SEQ ID NO: 98385 - protein, 14 aa, Severe acute respiratory syndrome coronavirus 2
KNIDGYFKIYSKHT

SEQ ID NO: 98386 - protein, 14 aa, Severe acute respiratory syndrome coronavirus 2
NIDGYFKIYSKHTP

SEQ ID NO: 98387 - protein, 14 aa, Severe acute respiratory syndrome coronavirus 2
IDGYFKIYSKHTPI

SEQ ID NO: 98388 - protein, 14 aa, Severe acute respiratory syndrome coronavirus 2
DGYFKIYSKHTPIN

SEQ ID NO: 98389 - protein, 14 aa, Severe acute respiratory syndrome coronavirus 2
GYFKIYSKHTPINL

SEQ ID NO: 98390 - protein, 14 aa, Severe acute respiratory syndrome coronavirus 2
YFKIYSKHTPINLV

SEQ ID NO: 98391 - protein, 14 aa, Severe acute respiratory syndrome coronavirus 2
FKIYSKHTPINLVR

SEQ ID NO: 98392 - protein, 14 aa, Severe acute respiratory syndrome coronavirus 2
LPQGFSALEPLVDL

SEQ ID NO: 98393 - protein, 14 aa, Severe acute respiratory syndrome coronavirus 2
PQGFSALEPLVDLP

SEQ ID NO: 98394 - protein, 14 aa, Severe acute respiratory syndrome coronavirus 2
QGFSALEPLVDLPI

SEQ ID NO: 98395 - protein, 14 aa, Severe acute respiratory syndrome coronavirus 2
GFSALEPLVDLPIG

SEQ ID NO: 98396 - protein, 14 aa, Severe acute respiratory syndrome coronavirus 2
FSALEPLVDLPIGI

SEQ ID NO: 98397 - protein, 14 aa, Severe acute respiratory syndrome coronavirus 2
AYYVGYLQPRTFLL

SEQ ID NO: 98398 - protein, 14 aa, Severe acute respiratory syndrome coronavirus 2
YYVGYLQPRTFLLK

SEQ ID NO: 98399 - protein, 14 aa, Severe acute respiratory syndrome coronavirus 2
YVGYLQPRTFLLKY

SEQ ID NO: 98400 - protein, 14 aa, Severe acute respiratory syndrome coronavirus 2
VGYLQPRTFLLKYN

SEQ ID NO: 98401 - protein, 14 aa, Severe acute respiratory syndrome coronavirus 2
GTITDAVDCALDPL

SEQ ID NO: 98402 - protein, 14 aa, Severe acute respiratory syndrome coronavirus 2
TITDAVDCALDPLS

SEQ ID NO: 98403 - protein, 14 aa, Severe acute respiratory syndrome coronavirus 2
GIYQTSNFRVQPTE

SEQ ID NO: 98404 - protein, 14 aa, Severe acute respiratory syndrome coronavirus 2
IYQTSNFRVQPTES

SEQ ID NO: 98405 - protein, 14 aa, Severe acute respiratory syndrome coronavirus 2
YQTSNFRVQPTESI

SEQ ID NO: 98406 - protein, 14 aa, Severe acute respiratory syndrome coronavirus 2
QTSNFRVQPTESIV

SEQ ID NO: 98407 - protein, 14 aa, Severe acute respiratory syndrome coronavirus 2
TSNFRVQPTESIVR

SEQ ID NO: 98408 - protein, 14 aa, Severe acute respiratory syndrome coronavirus 2
SNFRVQPTESIVRF

SEQ ID NO: 98409 - protein, 14 aa, Severe acute respiratory syndrome coronavirus 2
TRFASVYAWNRKRI

SEQ ID NO: 98410 - protein, 14 aa, Severe acute respiratory syndrome coronavirus 2
RFASVYAWNRKRIS

SEQ ID NO: 98411 - protein, 14 aa, Severe acute respiratory syndrome coronavirus 2
FASVYAWNRKRISN

SEQ ID NO: 98412 - protein, 14 aa, Severe acute respiratory syndrome coronavirus 2
ASVYAWNRKRISNC

SEQ ID NO: 98413 - protein, 14 aa, Severe acute respiratory syndrome coronavirus 2
SVYAWNRKRISNCV

SEQ ID NO: 98414 - protein, 14 aa, Severe acute respiratory syndrome coronavirus 2
VYAWNRKRISNCVA

SEQ ID NO: 98415 - protein, 14 aa, Severe acute respiratory syndrome coronavirus 2
LYNSASFSTFKCYG

SEQ ID NO: 98416 - protein, 14 aa, Severe acute respiratory syndrome coronavirus 2
YNSASFSTFKCYGV

SEQ ID NO: 98417 - protein, 14 aa, Severe acute respiratory syndrome coronavirus 2
TKLNDLCFTNVYAD

SEQ ID NO: 98418 - protein, 14 aa, Severe acute respiratory syndrome coronavirus 2
KLNDLCFTNVYADS

SEQ ID NO: 98419 - protein, 14 aa, Severe acute respiratory syndrome coronavirus 2
LNDLCFTNVYADSF

SEQ ID NO: 98420 - protein, 14 aa, Severe acute respiratory syndrome coronavirus 2
NDLCFTNVYADSFV

SEQ ID NO: 98421 - protein, 14 aa, Severe acute respiratory syndrome coronavirus 2
DLCFTNVYADSFVI

SEQ ID NO: 98422 - protein, 14 aa, Severe acute respiratory syndrome coronavirus 2
LCFTNVYADSFVIR

SEQ ID NO: 98423 - protein, 14 aa, Severe acute respiratory syndrome coronavirus 2
CFTNVYADSFVIRG

SEQ ID NO: 98424 - protein, 14 aa, Severe acute respiratory syndrome coronavirus 2
FTNVYADSFVIRGD

SEQ ID NO: 98425 - protein, 14 aa, Severe acute respiratory syndrome coronavirus 2
TNVYADSFVIRGDE

SEQ ID NO: 98426 - protein, 14 aa, Severe acute respiratory syndrome coronavirus 2
NVYADSFVIRGDEV

SEQ ID NO: 98427 - protein, 14 aa, Severe acute respiratory syndrome coronavirus 2
ADSFVIRGDEVRQI

SEQ ID NO: 98428 - protein, 14 aa, Severe acute respiratory syndrome coronavirus 2
DSFVIRGDEVRQIA

SEQ ID NO: 98429 - protein, 14 aa, Severe acute respiratory syndrome coronavirus 2
SFVIRGDEVRQIAP

SEQ ID NO: 98430 - protein, 14 aa, Severe acute respiratory syndrome coronavirus 2
FVIRGDEVRQIAPG

SEQ ID NO: 98431 - protein, 14 aa, Severe acute respiratory syndrome coronavirus 2
DEVRQIAPGQTGKI

SEQ ID NO: 98432 - protein, 14 aa, Severe acute respiratory syndrome coronavirus 2
EVRQIAPGQTGKIA

SEQ ID NO: 98433 - protein, 14 aa, Severe acute respiratory syndrome coronavirus 2
VRQIAPGQTGKIAD

SEQ ID NO: 98434 - protein, 14 aa, Severe acute respiratory syndrome coronavirus 2
RQIAPGQTGKIADY

SEQ ID NO: 98435 - protein, 14 aa, Severe acute respiratory syndrome coronavirus 2
QIAPGQTGKIADYN

SEQ ID NO: 98436 - protein, 14 aa, Severe acute respiratory syndrome coronavirus 2
IAPGQTGKIADYNY

SEQ ID NO: 98437 - protein, 14 aa, Severe acute respiratory syndrome coronavirus 2
KLPDDFTGCVIAWN

SEQ ID NO: 98438 - protein, 14 aa, Severe acute respiratory syndrome coronavirus 2
LPDDFTGCVIAWNS

SEQ ID NO: 98439 - protein, 14 aa, Severe acute respiratory syndrome coronavirus 2
PDDFTGCVIAWNSN

SEQ ID NO: 98440 - protein, 14 aa, Severe acute respiratory syndrome coronavirus 2
DDFTGCVIAWNSNN

SEQ ID NO: 98441 - protein, 14 aa, Severe acute respiratory syndrome coronavirus 2
DFTGCVIAWNSNNL

SEQ ID NO: 98442 - protein, 14 aa, Severe acute respiratory syndrome coronavirus 2
FTGCVIAWNSNNLD

SEQ ID NO: 98443 - protein, 14 aa, Severe acute respiratory syndrome coronavirus 2
TGCVIAWNSNNLDS

SEQ ID NO: 98444 - protein, 14 aa, Severe acute respiratory syndrome coronavirus 2
GCVIAWNSNNLDSK

SEQ ID NO: 98445 - protein, 14 aa, Severe acute respiratory syndrome coronavirus 2
CVIAWNSNNLDSKV

SEQ ID NO: 98446 - protein, 14 aa, Severe acute respiratory syndrome coronavirus 2
VIAWNSNNLDSKVG

SEQ ID NO: 98447 - protein, 14 aa, Severe acute respiratory syndrome coronavirus 2
DSKVGGNYNYLYRL

SEQ ID NO: 98448 - protein, 14 aa, Severe acute respiratory syndrome coronavirus 2
SKVGGNYNYLYRLF

SEQ ID NO: 98449 - protein, 14 aa, Severe acute respiratory syndrome coronavirus 2
KVGGNYNYLYRLFR

SEQ ID NO: 98450 - protein, 14 aa, Severe acute respiratory syndrome coronavirus 2
VGGNYNYLYRLFRK

SEQ ID NO: 98451 - protein, 14 aa, Severe acute respiratory syndrome coronavirus 2
GGNYNYLYRLFRKS

SEQ ID NO: 98452 - protein, 14 aa, Severe acute respiratory syndrome coronavirus 2
GNYNYLYRLFRKSN

SEQ ID NO: 98453 - protein, 14 aa, Severe acute respiratory syndrome coronavirus 2
NYNYLYRLFRKSNL

SEQ ID NO: 98454 - protein, 14 aa, Severe acute respiratory syndrome coronavirus 2
YNYLYRLFRKSNLK

SEQ ID NO: 98455 - protein, 14 aa, Severe acute respiratory syndrome coronavirus 2
NYLYRLFRKSNLKP

SEQ ID NO: 98456 - protein, 14 aa, Severe acute respiratory syndrome coronavirus 2
YLYRLFRKSNLKPF

SEQ ID NO: 98457 - protein, 14 aa, Severe acute respiratory syndrome coronavirus 2
LYRLFRKSNLKPFE

SEQ ID NO: 98458 - protein, 14 aa, Severe acute respiratory syndrome coronavirus 2
YRLFRKSNLKPFER

SEQ ID NO: 98459 - protein, 14 aa, Severe acute respiratory syndrome coronavirus 2
RLFRKSNLKPFERD

SEQ ID NO: 98460 - protein, 14 aa, Severe acute respiratory syndrome coronavirus 2
LQSYGFQPTNGVGY

SEQ ID NO: 98461 - protein, 14 aa, Severe acute respiratory syndrome coronavirus 2
QSYGFQPTNGVGYQ

SEQ ID NO: 98462 - protein, 14 aa, Severe acute respiratory syndrome coronavirus 2
SYGFQPTNGVGYQP

SEQ ID NO: 98463 - protein, 14 aa, Severe acute respiratory syndrome coronavirus 2
YGFQPTNGVGYQPY

SEQ ID NO: 98464 - protein, 14 aa, Severe acute respiratory syndrome coronavirus 2
PTNGVGYQPYRVVV

SEQ ID NO: 98465 - protein, 14 aa, Severe acute respiratory syndrome coronavirus 2
TNGVGYQPYRVVVL

SEQ ID NO: 98466 - protein, 14 aa, Severe acute respiratory syndrome coronavirus 2
NGVGYQPYRVVVLS

SEQ ID NO: 98467 - protein, 14 aa, Severe acute respiratory syndrome coronavirus 2
GVGYQPYRVVVLSF

SEQ ID NO: 98468 - protein, 14 aa, Severe acute respiratory syndrome coronavirus 2
VGYQPYRVVVLSFE

SEQ ID NO: 98469 - protein, 14 aa, Severe acute respiratory syndrome coronavirus 2
GYQPYRVVVLSFEL

SEQ ID NO: 98470 - protein, 14 aa, Severe acute respiratory syndrome coronavirus 2
YQPYRVVVLSFELL

SEQ ID NO: 98471 - protein, 14 aa, Severe acute respiratory syndrome coronavirus 2
QPYRVVVLSFELLH

SEQ ID NO: 98472 - protein, 14 aa, Severe acute respiratory syndrome coronavirus 2
KKSTNLVKNKCVNF

SEQ ID NO: 98473 - protein, 14 aa, Severe acute respiratory syndrome coronavirus 2
KSTNLVKNKCVNFN

SEQ ID NO: 98474 - protein, 14 aa, Severe acute respiratory syndrome coronavirus 2
STNLVKNKCVNFNF

SEQ ID NO: 98475 - protein, 14 aa, Severe acute respiratory syndrome coronavirus 2
TNLVKNKCVNFNFN

SEQ ID NO: 98476 - protein, 14 aa, Severe acute respiratory syndrome coronavirus 2
NLVKNKCVNFNFNG

SEQ ID NO: 98477 - protein, 14 aa, Severe acute respiratory syndrome coronavirus 2
LVKNKCVNFNFNGL

SEQ ID NO: 98478 - protein, 14 aa, Severe acute respiratory syndrome coronavirus 2
VKNKCVNFNFNGLT

SEQ ID NO: 98479 - protein, 14 aa, Severe acute respiratory syndrome coronavirus 2
KNKCVNFNFNGLTG

SEQ ID NO: 98480 - protein, 14 aa, Severe acute respiratory syndrome coronavirus 2
NKCVNFNFNGLTGT

SEQ ID NO: 98481 - protein, 14 aa, Severe acute respiratory syndrome coronavirus 2
KCVNFNFNGLTGTG

SEQ ID NO: 98482 - protein, 14 aa, Severe acute respiratory syndrome coronavirus 2
CVNFNFNGLTGTGV

SEQ ID NO: 98483 - protein, 14 aa, Severe acute respiratory syndrome coronavirus 2
VNFNFNGLTGTGVL

SEQ ID NO: 98484 - protein, 14 aa, Severe acute respiratory syndrome coronavirus 2
NFNFNGLTGTGVLT

SEQ ID NO: 98485 - protein, 14 aa, Severe acute respiratory syndrome coronavirus 2
FNFNGLTGTGVLTE

SEQ ID NO: 98486 - protein, 14 aa, Severe acute respiratory syndrome coronavirus 2
NFNGLTGTGVLTES

SEQ ID NO: 98487 - protein, 14 aa, Severe acute respiratory syndrome coronavirus 2
FNGLTGTGVLTESN

SEQ ID NO: 98488 - protein, 14 aa, Severe acute respiratory syndrome coronavirus 2
NGLTGTGVLTESNK

SEQ ID NO: 98489 - protein, 14 aa, Severe acute respiratory syndrome coronavirus 2
LTESNKKFLPFQQF

SEQ ID NO: 98490 - protein, 14 aa, Severe acute respiratory syndrome coronavirus 2
TESNKKFLPFQQFG

SEQ ID NO: 98491 - protein, 14 aa, Severe acute respiratory syndrome coronavirus 2
ESNKKFLPFQQFGR

SEQ ID NO: 98492 - protein, 14 aa, Severe acute respiratory syndrome coronavirus 2
PQTLEILDITPCSF

SEQ ID NO: 98493 - protein, 14 aa, Severe acute respiratory syndrome coronavirus 2
QTLEILDITPCSFG

SEQ ID NO: 98494 - protein, 14 aa, Severe acute respiratory syndrome coronavirus 2
TLEILDITPCSFGG

SEQ ID NO: 98495 - protein, 14 aa, Severe acute respiratory syndrome coronavirus 2
LDITPCSFGGVSVI

SEQ ID NO: 98496 - protein, 14 aa, Severe acute respiratory syndrome coronavirus 2
DITPCSFGGVSVIT

SEQ ID NO: 98497 - protein, 14 aa, Severe acute respiratory syndrome coronavirus 2
ITPCSFGGVSVITP

SEQ ID NO: 98498 - protein, 14 aa, Severe acute respiratory syndrome coronavirus 2
TPCSFGGVSVITPG

SEQ ID NO: 98499 - protein, 14 aa, Severe acute respiratory syndrome coronavirus 2
PCSFGGVSVITPGT

SEQ ID NO: 98500 - protein, 14 aa, Severe acute respiratory syndrome coronavirus 2
DQLTPTWRVYSTGS

SEQ ID NO: 98501 - protein, 14 aa, Severe acute respiratory syndrome coronavirus 2
QLTPTWRVYSTGSN

SEQ ID NO: 98502 - protein, 14 aa, Severe acute respiratory syndrome coronavirus 2
TPTWRVYSTGSNVF

SEQ ID NO: 98503 - protein, 14 aa, Severe acute respiratory syndrome coronavirus 2
PTWRVYSTGSNVFQ

SEQ ID NO: 98504 - protein, 14 aa, Severe acute respiratory syndrome coronavirus 2
TWRVYSTGSNVFQT

SEQ ID NO: 98505 - protein, 14 aa, Severe acute respiratory syndrome coronavirus 2
WRVYSTGSNVFQTR

SEQ ID NO: 98506 - protein, 14 aa, Severe acute respiratory syndrome coronavirus 2
RVYSTGSNVFQTRA

SEQ ID NO: 98507 - protein, 14 aa, Severe acute respiratory syndrome coronavirus 2
VYSTGSNVFQTRAG

SEQ ID NO: 98508 - protein, 14 aa, Severe acute respiratory syndrome coronavirus 2
YSTGSNVFQTRAGC

SEQ ID NO: 98509 - protein, 14 aa, Severe acute respiratory syndrome coronavirus 2
STGSNVFQTRAGCL

SEQ ID NO: 98510 - protein, 14 aa, Severe acute respiratory syndrome coronavirus 2
TGSNVFQTRAGCLI

SEQ ID NO: 98511 - protein, 14 aa, Severe acute respiratory syndrome coronavirus 2
GSNVFQTRAGCLIG

SEQ ID NO: 98512 - protein, 14 aa, Severe acute respiratory syndrome coronavirus 2
SNVFQTRAGCLIGA

SEQ ID NO: 98513 - protein, 14 aa, Severe acute respiratory syndrome coronavirus 2
YECDIPIGAGICAS

SEQ ID NO: 98514 - protein, 14 aa, Severe acute respiratory syndrome coronavirus 2
ECDIPIGAGICASY

SEQ ID NO: 98515 - protein, 14 aa, Severe acute respiratory syndrome coronavirus 2
ECSNLLLQYGSFCT

SEQ ID NO: 98516 - protein, 14 aa, Severe acute respiratory syndrome coronavirus 2
CSNLLLQYGSFCTQ

SEQ ID NO: 98517 - protein, 14 aa, Severe acute respiratory syndrome coronavirus 2
SNLLLQYGSFCTQL

SEQ ID NO: 98518 - protein, 14 aa, Severe acute respiratory syndrome coronavirus 2
NLLLQYGSFCTQLN

SEQ ID NO: 98519 - protein, 14 aa, Severe acute respiratory syndrome coronavirus 2
NTQEVFAQVKQIYK

SEQ ID NO: 98520 - protein, 14 aa, Severe acute respiratory syndrome coronavirus 2
FSQILPDPSKPSKR

SEQ ID NO: 98521 - protein, 14 aa, Severe acute respiratory syndrome coronavirus 2
VLPPLLTDEMIAQY

SEQ ID NO: 98522 - protein, 14 aa, Severe acute respiratory syndrome coronavirus 2
LPPLLTDEMIAQYT

SEQ ID NO: 98523 - protein, 14 aa, Severe acute respiratory syndrome coronavirus 2
PPLLTDEMIAQYTS

SEQ ID NO: 98524 - protein, 14 aa, Severe acute respiratory syndrome coronavirus 2
PLLTDEMIAQYTSA

SEQ ID NO: 98525 - protein, 14 aa, Severe acute respiratory syndrome coronavirus 2
LLTDEMIAQYTSAL

SEQ ID NO: 98526 - protein, 14 aa, Severe acute respiratory syndrome coronavirus 2
LTDEMIAQYTSALL

SEQ ID NO: 98527 - protein, 14 aa, Severe acute respiratory syndrome coronavirus 2
GWTFGAGAALQIPF

SEQ ID NO: 98528 - protein, 14 aa, Severe acute respiratory syndrome coronavirus 2
WTFGAGAALQIPFA

SEQ ID NO: 98529 - protein, 14 aa, Severe acute respiratory syndrome coronavirus 2
TFGAGAALQIPFAM

SEQ ID NO: 98530 - protein, 14 aa, Severe acute respiratory syndrome coronavirus 2
FGAGAALQIPFAMQ

SEQ ID NO: 98531 - protein, 14 aa, Severe acute respiratory syndrome coronavirus 2
GAGAALQIPFAMQM

SEQ ID NO: 98532 - protein, 14 aa, Severe acute respiratory syndrome coronavirus 2
AGAALQIPFAMQMA

SEQ ID NO: 98533 - protein, 14 aa, Severe acute respiratory syndrome coronavirus 2
GAALQIPFAMQMAY

SEQ ID NO: 98534 - protein, 14 aa, Severe acute respiratory syndrome coronavirus 2
AALQIPFAMQMAYR

SEQ ID NO: 98535 - protein, 14 aa, Severe acute respiratory syndrome coronavirus 2
ALQIPFAMQMAYRF

SEQ ID NO: 98536 - protein, 14 aa, Severe acute respiratory syndrome coronavirus 2
LQIPFAMQMAYRFN

SEQ ID NO: 98537 - protein, 14 aa, Severe acute respiratory syndrome coronavirus 2
QIPFAMQMAYRFNG

SEQ ID NO: 98538 - protein, 14 aa, Severe acute respiratory syndrome coronavirus 2
IPFAMQMAYRFNGI

SEQ ID NO: 98539 - protein, 14 aa, Severe acute respiratory syndrome coronavirus 2
PFAMQMAYRFNGIG

SEQ ID NO: 98540 - protein, 14 aa, Severe acute respiratory syndrome coronavirus 2
FAMQMAYRFNGIGV

SEQ ID NO: 98541 - protein, 14 aa, Severe acute respiratory syndrome coronavirus 2
AMQMAYRFNGIGVT

SEQ ID NO: 98542 - protein, 14 aa, Severe acute respiratory syndrome coronavirus 2
MQMAYRFNGIGVTQ

SEQ ID NO: 98543 - protein, 14 aa, Severe acute respiratory syndrome coronavirus 2
QMAYRFNGIGVTQN

SEQ ID NO: 98544 - protein, 14 aa, Severe acute respiratory syndrome coronavirus 2
MAYRFNGIGVTQNV

SEQ ID NO: 98545 - protein, 14 aa, Severe acute respiratory syndrome coronavirus 2
AYRFNGIGVTQNVL

SEQ ID NO: 98546 - protein, 14 aa, Severe acute respiratory syndrome coronavirus 2
YRFNGIGVTQNVLY

SEQ ID NO: 98547 - protein, 14 aa, Severe acute respiratory syndrome coronavirus 2
RFNGIGVTQNVLYE

SEQ ID NO: 98548 - protein, 14 aa, Severe acute respiratory syndrome coronavirus 2
FNGIGVTQNVLYEN

SEQ ID NO: 98549 - protein, 14 aa, Severe acute respiratory syndrome coronavirus 2
IGVTQNVLYENQKL

SEQ ID NO: 98550 - protein, 14 aa, Severe acute respiratory syndrome coronavirus 2
GVTQNVLYENQKLI

SEQ ID NO: 98551 - protein, 14 aa, Severe acute respiratory syndrome coronavirus 2
VTQNVLYENQKLIA

SEQ ID NO: 98552 - protein, 14 aa, Severe acute respiratory syndrome coronavirus 2
TQNVLYENQKLIAN

SEQ ID NO: 98553 - protein, 14 aa, Severe acute respiratory syndrome coronavirus 2
QNVLYENQKLIANQ

SEQ ID NO: 98554 - protein, 14 aa, Severe acute respiratory syndrome coronavirus 2
NVLYENQKLIANQF

SEQ ID NO: 98555 - protein, 14 aa, Severe acute respiratory syndrome coronavirus 2
VLYENQKLIANQFN

SEQ ID NO: 98556 - protein, 14 aa, Severe acute respiratory syndrome coronavirus 2
LVKQLSSNFGAISS

SEQ ID NO: 98557 - protein, 14 aa, Severe acute respiratory syndrome coronavirus 2
VKQLSSNFGAISSV

SEQ ID NO: 98558 - protein, 14 aa, Severe acute respiratory syndrome coronavirus 2
KQLSSNFGAISSVL

SEQ ID NO: 98559 - protein, 14 aa, Severe acute respiratory syndrome coronavirus 2
QLSSNFGAISSVLN

SEQ ID NO: 98560 - protein, 14 aa, Severe acute respiratory syndrome coronavirus 2
LSSNFGAISSVLND

SEQ ID NO: 98561 - protein, 14 aa, Severe acute respiratory syndrome coronavirus 2
SSNFGAISSVLNDI

SEQ ID NO: 98562 - protein, 14 aa, Severe acute respiratory syndrome coronavirus 2
SNFGAISSVLNDIL

SEQ ID NO: 98563 - protein, 14 aa, Severe acute respiratory syndrome coronavirus 2
NFGAISSVLNDILS

SEQ ID NO: 98564 - protein, 14 aa, Severe acute respiratory syndrome coronavirus 2
FGAISSVLNDILSR

SEQ ID NO: 98565 - protein, 14 aa, Severe acute respiratory syndrome coronavirus 2
GAISSVLNDILSRL

SEQ ID NO: 98566 - protein, 14 aa, Severe acute respiratory syndrome coronavirus 2
AISSVLNDILSRLD

SEQ ID NO: 98567 - protein, 14 aa, Severe acute respiratory syndrome coronavirus 2
ISSVLNDILSRLDK

SEQ ID NO: 98568 - protein, 14 aa, Severe acute respiratory syndrome coronavirus 2
SSVLNDILSRLDKV

SEQ ID NO: 98569 - protein, 14 aa, Severe acute respiratory syndrome coronavirus 2
SVLNDILSRLDKVE

SEQ ID NO: 98570 - protein, 14 aa, Severe acute respiratory syndrome coronavirus 2
VLNDILSRLDKVEA

SEQ ID NO: 98571 - protein, 14 aa, Severe acute respiratory syndrome coronavirus 2
NDILSRLDKVEAEV

SEQ ID NO: 98572 - protein, 14 aa, Severe acute respiratory syndrome coronavirus 2
DILSRLDKVEAEVQ

SEQ ID NO: 98573 - protein, 14 aa, Severe acute respiratory syndrome coronavirus 2
VEAEVQIDRLITGR

SEQ ID NO: 98574 - protein, 14 aa, Severe acute respiratory syndrome coronavirus 2
EAEVQIDRLITGRL

SEQ ID NO: 98575 - protein, 14 aa, Severe acute respiratory syndrome coronavirus 2
AEVQIDRLITGRLQ

SEQ ID NO: 98576 - protein, 14 aa, Severe acute respiratory syndrome coronavirus 2
EVQIDRLITGRLQS

SEQ ID NO: 98577 - protein, 14 aa, Severe acute respiratory syndrome coronavirus 2
VQIDRLITGRLQSL

SEQ ID NO: 98578 - protein, 14 aa, Severe acute respiratory syndrome coronavirus 2
QIDRLITGRLQSLQ

SEQ ID NO: 98579 - protein, 14 aa, Severe acute respiratory syndrome coronavirus 2
IDRLITGRLQSLQT

SEQ ID NO: 98580 - protein, 14 aa, Severe acute respiratory syndrome coronavirus 2
DRLITGRLQSLQTY

SEQ ID NO: 98581 - protein, 14 aa, Severe acute respiratory syndrome coronavirus 2
RLITGRLQSLQTYV

SEQ ID NO: 98582 - protein, 14 aa, Severe acute respiratory syndrome coronavirus 2
LITGRLQSLQTYVT

SEQ ID NO: 98583 - protein, 14 aa, Severe acute respiratory syndrome coronavirus 2
ITGRLQSLQTYVTQ

SEQ ID NO: 98584 - protein, 14 aa, Severe acute respiratory syndrome coronavirus 2
TGRLQSLQTYVTQQ

SEQ ID NO: 98585 - protein, 14 aa, Severe acute respiratory syndrome coronavirus 2
GRLQSLQTYVTQQL

SEQ ID NO: 98586 - protein, 14 aa, Severe acute respiratory syndrome coronavirus 2
RLQSLQTYVTQQLI

SEQ ID NO: 98587 - protein, 14 aa, Severe acute respiratory syndrome coronavirus 2
LQSLQTYVTQQLIR

SEQ ID NO: 98588 - protein, 14 aa, Severe acute respiratory syndrome coronavirus 2
QSLQTYVTQQLIRA

SEQ ID NO: 98589 - protein, 14 aa, Severe acute respiratory syndrome coronavirus 2
SLQTYVTQQLIRAA

SEQ ID NO: 98590 - protein, 14 aa, Severe acute respiratory syndrome coronavirus 2
LQTYVTQQLIRAAE

SEQ ID NO: 98591 - protein, 14 aa, Severe acute respiratory syndrome coronavirus 2
QTYVTQQLIRAAEI

SEQ ID NO: 98592 - protein, 14 aa, Severe acute respiratory syndrome coronavirus 2
TYVTQQLIRAAEIR

SEQ ID NO: 98593 - protein, 14 aa, Severe acute respiratory syndrome coronavirus 2
KMSECVLGQSKRVD

SEQ ID NO: 98594 - protein, 14 aa, Severe acute respiratory syndrome coronavirus 2
MSECVLGQSKRVDF

SEQ ID NO: 98595 - protein, 14 aa, Severe acute respiratory syndrome coronavirus 2
SECVLGQSKRVDFC

SEQ ID NO: 98596 - protein, 14 aa, Severe acute respiratory syndrome coronavirus 2
RVDFCGKGYHLMSF

SEQ ID NO: 98597 - protein, 14 aa, Severe acute respiratory syndrome coronavirus 2
FCGKGYHLMSFPQS

SEQ ID NO: 98598 - protein, 14 aa, Severe acute respiratory syndrome coronavirus 2
CGKGYHLMSFPQSA

SEQ ID NO: 98599 - protein, 14 aa, Severe acute respiratory syndrome coronavirus 2
GKGYHLMSFPQSAP

SEQ ID NO: 98600 - protein, 14 aa, Severe acute respiratory syndrome coronavirus 2
KGYHLMSFPQSAPH

SEQ ID NO: 98601 - protein, 14 aa, Severe acute respiratory syndrome coronavirus 2
GYHLMSFPQSAPHG

SEQ ID NO: 98602 - protein, 14 aa, Severe acute respiratory syndrome coronavirus 2
YHLMSFPQSAPHGV

SEQ ID NO: 98603 - protein, 14 aa, Severe acute respiratory syndrome coronavirus 2
HLMSFPQSAPHGVV

SEQ ID NO: 98604 - protein, 14 aa, Severe acute respiratory syndrome coronavirus 2
MSFPQSAPHGVVFL

SEQ ID NO: 98605 - protein, 14 aa, Severe acute respiratory syndrome coronavirus 2
SFPQSAPHGVVFLH

SEQ ID NO: 98606 - protein, 14 aa, Severe acute respiratory syndrome coronavirus 2
FPQSAPHGVVFLHV

SEQ ID NO: 98607 - protein, 14 aa, Severe acute respiratory syndrome coronavirus 2
PQSAPHGVVFLHVT

SEQ ID NO: 98608 - protein, 14 aa, Severe acute respiratory syndrome coronavirus 2
QSAPHGVVFLHVTY

SEQ ID NO: 98609 - protein, 14 aa, Severe acute respiratory syndrome coronavirus 2
SAPHGVVFLHVTYV

SEQ ID NO: 98610 - protein, 14 aa, Severe acute respiratory syndrome coronavirus 2
APHGVVFLHVTYVP

SEQ ID NO: 98611 - protein, 14 aa, Severe acute respiratory syndrome coronavirus 2
PHGVVFLHVTYVPA

SEQ ID NO: 98612 - protein, 14 aa, Severe acute respiratory syndrome coronavirus 2
HGVVFLHVTYVPAQ

SEQ ID NO: 98613 - protein, 14 aa, Severe acute respiratory syndrome coronavirus 2
GVVFLHVTYVPAQE

SEQ ID NO: 98614 - protein, 14 aa, Severe acute respiratory syndrome coronavirus 2
VVFLHVTYVPAQEK

SEQ ID NO: 98615 - protein, 14 aa, Severe acute respiratory syndrome coronavirus 2
WFVTQRNFYEPQII

SEQ ID NO: 98616 - protein, 14 aa, Severe acute respiratory syndrome coronavirus 2
FVTQRNFYEPQIIT

SEQ ID NO: 98617 - protein, 14 aa, Severe acute respiratory syndrome coronavirus 2
VTQRNFYEPQIITT

SEQ ID NO: 98618 - protein, 14 aa, Severe acute respiratory syndrome coronavirus 2
TQRNFYEPQIITTD

SEQ ID NO: 98619 - protein, 14 aa, Severe acute respiratory syndrome coronavirus 2
QRNFYEPQIITTDN

SEQ ID NO: 98620 - protein, 14 aa, Severe acute respiratory syndrome coronavirus 2
RNFYEPQIITTDNT

SEQ ID NO: 98621 - protein, 14 aa, Severe acute respiratory syndrome coronavirus 2
YEPQIITTDNTFVS

SEQ ID NO: 98622 - protein, 15 aa, Severe acute respiratory syndrome coronavirus 2
NIIRGWIFGTTLDSK

SEQ ID NO: 98623 - protein, 15 aa, Severe acute respiratory syndrome coronavirus 2
IIRGWIFGTTLDSKT

SEQ ID NO: 98624 - protein, 15 aa, Severe acute respiratory syndrome coronavirus 2
IRGWIFGTTLDSKTQ

SEQ ID NO: 98625 - protein, 15 aa, Severe acute respiratory syndrome coronavirus 2
RGWIFGTTLDSKTQS

SEQ ID NO: 98626 - protein, 15 aa, Severe acute respiratory syndrome coronavirus 2
GWIFGTTLDSKTQSL

SEQ ID NO: 98627 - protein, 15 aa, Severe acute respiratory syndrome coronavirus 2
WIFGTTLDSKTQSLL

SEQ ID NO: 98628 - protein, 15 aa, Severe acute respiratory syndrome coronavirus 2
IFGTTLDSKTQSLLI

SEQ ID NO: 98629 - protein, 15 aa, Severe acute respiratory syndrome coronavirus 2
ATNVVIKVCEFQFCN

SEQ ID NO: 98630 - protein, 15 aa, Severe acute respiratory syndrome coronavirus 2
FKNLREFVFKNIDGY

SEQ ID NO: 98631 - protein, 15 aa, Severe acute respiratory syndrome coronavirus 2
KNLREFVFKNIDGYF

SEQ ID NO: 98632 - protein, 15 aa, Severe acute respiratory syndrome coronavirus 2
NLREFVFKNIDGYFK

SEQ ID NO: 98633 - protein, 15 aa, Severe acute respiratory syndrome coronavirus 2
LREFVFKNIDGYFKI

SEQ ID NO: 98634 - protein, 15 aa, Severe acute respiratory syndrome coronavirus 2
REFVFKNIDGYFKIY

SEQ ID NO: 98635 - protein, 15 aa, Severe acute respiratory syndrome coronavirus 2
EFVFKNIDGYFKIYS

SEQ ID NO: 98636 - protein, 15 aa, Severe acute respiratory syndrome coronavirus 2
FVFKNIDGYFKIYSK

SEQ ID NO: 98637 - protein, 15 aa, Severe acute respiratory syndrome coronavirus 2
VFKNIDGYFKIYSKH

SEQ ID NO: 98638 - protein, 15 aa, Severe acute respiratory syndrome coronavirus 2
FKNIDGYFKIYSKHT

SEQ ID NO: 98639 - protein, 15 aa, Severe acute respiratory syndrome coronavirus 2
KNIDGYFKIYSKHTP

SEQ ID NO: 98640 - protein, 15 aa, Severe acute respiratory syndrome coronavirus 2
NIDGYFKIYSKHTPI

SEQ ID NO: 98641 - protein, 15 aa, Severe acute respiratory syndrome coronavirus 2
IDGYFKIYSKHTPIN

SEQ ID NO: 98642 - protein, 15 aa, Severe acute respiratory syndrome coronavirus 2
DGYFKIYSKHTPINL

SEQ ID NO: 98643 - protein, 15 aa, Severe acute respiratory syndrome coronavirus 2
GYFKIYSKHTPINLV

SEQ ID NO: 98644 - protein, 15 aa, Severe acute respiratory syndrome coronavirus 2
YFKIYSKHTPINLVR

SEQ ID NO: 98645 - protein, 15 aa, Severe acute respiratory syndrome coronavirus 2
LPQGFSALEPLVDLP

SEQ ID NO: 98646 - protein, 15 aa, Severe acute respiratory syndrome coronavirus 2
PQGFSALEPLVDLPI

SEQ ID NO: 98647 - protein, 15 aa, Severe acute respiratory syndrome coronavirus 2
QGFSALEPLVDLPIG

SEQ ID NO: 98648 - protein, 15 aa, Severe acute respiratory syndrome coronavirus 2
GFSALEPLVDLPIGI

SEQ ID NO: 98649 - protein, 15 aa, Severe acute respiratory syndrome coronavirus 2
AYYVGYLQPRTFLLK

SEQ ID NO: 98650 - protein, 15 aa, Severe acute respiratory syndrome coronavirus 2
YYVGYLQPRTFLLKY

SEQ ID NO: 98651 - protein, 15 aa, Severe acute respiratory syndrome coronavirus 2
YVGYLQPRTFLLKYN

SEQ ID NO: 98652 - protein, 15 aa, Severe acute respiratory syndrome coronavirus 2
GTITDAVDCALDPLS

SEQ ID NO: 98653 - protein, 15 aa, Severe acute respiratory syndrome coronavirus 2
TITDAVDCALDPLSE

SEQ ID NO: 98654 - protein, 15 aa, Severe acute respiratory syndrome coronavirus 2
ITDAVDCALDPLSET

SEQ ID NO: 98655 - protein, 15 aa, Severe acute respiratory syndrome coronavirus 2
GIYQTSNFRVQPTES

SEQ ID NO: 98656 - protein, 15 aa, Severe acute respiratory syndrome coronavirus 2
IYQTSNFRVQPTESI

SEQ ID NO: 98657 - protein, 15 aa, Severe acute respiratory syndrome coronavirus 2
YQTSNFRVQPTESIV

SEQ ID NO: 98658 - protein, 15 aa, Severe acute respiratory syndrome coronavirus 2
QTSNFRVQPTESIVR

SEQ ID NO: 98659 - protein, 15 aa, Severe acute respiratory syndrome coronavirus 2
TSNFRVQPTESIVRF

SEQ ID NO: 98660 - protein, 15 aa, Severe acute respiratory syndrome coronavirus 2
TRFASVYAWNRKRIS

SEQ ID NO: 98661 - protein, 15 aa, Severe acute respiratory syndrome coronavirus 2
RFASVYAWNRKRISN

SEQ ID NO: 98662 - protein, 15 aa, Severe acute respiratory syndrome coronavirus 2
FASVYAWNRKRISNC

SEQ ID NO: 98663 - protein, 15 aa, Severe acute respiratory syndrome coronavirus 2
ASVYAWNRKRISNCV

SEQ ID NO: 98664 - protein, 15 aa, Severe acute respiratory syndrome coronavirus 2
SVYAWNRKRISNCVA

SEQ ID NO: 98665 - protein, 15 aa, Severe acute respiratory syndrome coronavirus 2
VYAWNRKRISNCVAD

SEQ ID NO: 98666 - protein, 15 aa, Severe acute respiratory syndrome coronavirus 2
YAWNRKRISNCVADY

SEQ ID NO: 98667 - protein, 15 aa, Severe acute respiratory syndrome coronavirus 2
AWNRKRISNCVADYS

SEQ ID NO: 98668 - protein, 15 aa, Severe acute respiratory syndrome coronavirus 2
LYNSASFSTFKCYGV

SEQ ID NO: 98669 - protein, 15 aa, Severe acute respiratory syndrome coronavirus 2
YNSASFSTFKCYGVS

SEQ ID NO: 98670 - protein, 15 aa, Severe acute respiratory syndrome coronavirus 2
TKLNDLCFTNVYADS

SEQ ID NO: 98671 - protein, 15 aa, Severe acute respiratory syndrome coronavirus 2
KLNDLCFTNVYADSF

SEQ ID NO: 98672 - protein, 15 aa, Severe acute respiratory syndrome coronavirus 2
LNDLCFTNVYADSFV

SEQ ID NO: 98673 - protein, 15 aa, Severe acute respiratory syndrome coronavirus 2
NDLCFTNVYADSFVI

SEQ ID NO: 98674 - protein, 15 aa, Severe acute respiratory syndrome coronavirus 2
DLCFTNVYADSFVIR

SEQ ID NO: 98675 - protein, 15 aa, Severe acute respiratory syndrome coronavirus 2
LCFTNVYADSFVIRG

SEQ ID NO: 98676 - protein, 15 aa, Severe acute respiratory syndrome coronavirus 2
CFTNVYADSFVIRGD

SEQ ID NO: 98677 - protein, 15 aa, Severe acute respiratory syndrome coronavirus 2
FTNVYADSFVIRGDE

SEQ ID NO: 98678 - protein, 15 aa, Severe acute respiratory syndrome coronavirus 2
TNVYADSFVIRGDEV

SEQ ID NO: 98679 - protein, 15 aa, Severe acute respiratory syndrome coronavirus 2
NVYADSFVIRGDEVR

SEQ ID NO: 98680 - protein, 15 aa, Severe acute respiratory syndrome coronavirus 2
VYADSFVIRGDEVRQ

SEQ ID NO: 98681 - protein, 15 aa, Severe acute respiratory syndrome coronavirus 2
YADSFVIRGDEVRQI

SEQ ID NO: 98682 - protein, 15 aa, Severe acute respiratory syndrome coronavirus 2
ADSFVIRGDEVRQIA

SEQ ID NO: 98683 - protein, 15 aa, Severe acute respiratory syndrome coronavirus 2
DSFVIRGDEVRQIAP

SEQ ID NO: 98684 - protein, 15 aa, Severe acute respiratory syndrome coronavirus 2
SFVIRGDEVRQIAPG

SEQ ID NO: 98685 - protein, 15 aa, Severe acute respiratory syndrome coronavirus 2
GDEVRQIAPGQTGKI

SEQ ID NO: 98686 - protein, 15 aa, Severe acute respiratory syndrome coronavirus 2
DEVRQIAPGQTGKIA

SEQ ID NO: 98687 - protein, 15 aa, Severe acute respiratory syndrome coronavirus 2
EVRQIAPGQTGKIAD

SEQ ID NO: 98688 - protein, 15 aa, Severe acute respiratory syndrome coronavirus 2
VRQIAPGQTGKIADY

SEQ ID NO: 98689 - protein, 15 aa, Severe acute respiratory syndrome coronavirus 2
RQIAPGQTGKIADYN

SEQ ID NO: 98690 - protein, 15 aa, Severe acute respiratory syndrome coronavirus 2
QIAPGQTGKIADYNY

SEQ ID NO: 98691 - protein, 15 aa, Severe acute respiratory syndrome coronavirus 2
IAPGQTGKIADYNYK

SEQ ID NO: 98692 - protein, 15 aa, Severe acute respiratory syndrome coronavirus 2
YKLPDDFTGCVIAWN

SEQ ID NO: 98693 - protein, 15 aa, Severe acute respiratory syndrome coronavirus 2
KLPDDFTGCVIAWNS

SEQ ID NO: 98694 - protein, 15 aa, Severe acute respiratory syndrome coronavirus 2
LPDDFTGCVIAWNSN

SEQ ID NO: 98695 - protein, 15 aa, Severe acute respiratory syndrome coronavirus 2
PDDFTGCVIAWNSNN

SEQ ID NO: 98696 - protein, 15 aa, Severe acute respiratory syndrome coronavirus 2
DDFTGCVIAWNSNNL

SEQ ID NO: 98697 - protein, 15 aa, Severe acute respiratory syndrome coronavirus 2
DFTGCVIAWNSNNLD

SEQ ID NO: 98698 - protein, 15 aa, Severe acute respiratory syndrome coronavirus 2
FTGCVIAWNSNNLDS

SEQ ID NO: 98699 - protein, 15 aa, Severe acute respiratory syndrome coronavirus 2
TGCVIAWNSNNLDSK

SEQ ID NO: 98700 - protein, 15 aa, Severe acute respiratory syndrome coronavirus 2
GCVIAWNSNNLDSKV

SEQ ID NO: 98701 - protein, 15 aa, Severe acute respiratory syndrome coronavirus 2
CVIAWNSNNLDSKVG

SEQ ID NO: 98702 - protein, 15 aa, Severe acute respiratory syndrome coronavirus 2
VIAWNSNNLDSKVGG

SEQ ID NO: 98703 - protein, 15 aa, Severe acute respiratory syndrome coronavirus 2
IAWNSNNLDSKVGGN

SEQ ID NO: 98704 - protein, 15 aa, Severe acute respiratory syndrome coronavirus 2
NLDSKVGGNYNYLYR

SEQ ID NO: 98705 - protein, 15 aa, Severe acute respiratory syndrome coronavirus 2
LDSKVGGNYNYLYRL

SEQ ID NO: 98706 - protein, 15 aa, Severe acute respiratory syndrome coronavirus 2
DSKVGGNYNYLYRLF

SEQ ID NO: 98707 - protein, 15 aa, Severe acute respiratory syndrome coronavirus 2
SKVGGNYNYLYRLFR

SEQ ID NO: 98708 - protein, 15 aa, Severe acute respiratory syndrome coronavirus 2
KVGGNYNYLYRLFRK

SEQ ID NO: 98709 - protein, 15 aa, Severe acute respiratory syndrome coronavirus 2
VGGNYNYLYRLFRKS

SEQ ID NO: 98710 - protein, 15 aa, Severe acute respiratory syndrome coronavirus 2
GGNYNYLYRLFRKSN

SEQ ID NO: 98711 - protein, 15 aa, Severe acute respiratory syndrome coronavirus 2
GNYNYLYRLFRKSNL

SEQ ID NO: 98712 - protein, 15 aa, Severe acute respiratory syndrome coronavirus 2
NYNYLYRLFRKSNLK

SEQ ID NO: 98713 - protein, 15 aa, Severe acute respiratory syndrome coronavirus 2
YNYLYRLFRKSNLKP

SEQ ID NO: 98714 - protein, 15 aa, Severe acute respiratory syndrome coronavirus 2
NYLYRLFRKSNLKPF

SEQ ID NO: 98715 - protein, 15 aa, Severe acute respiratory syndrome coronavirus 2
YLYRLFRKSNLKPFE

SEQ ID NO: 98716 - protein, 15 aa, Severe acute respiratory syndrome coronavirus 2
LYRLFRKSNLKPFER

SEQ ID NO: 98717 - protein, 15 aa, Severe acute respiratory syndrome coronavirus 2
YRLFRKSNLKPFERD

SEQ ID NO: 98718 - protein, 15 aa, Severe acute respiratory syndrome coronavirus 2
LQSYGFQPTNGVGYQ

SEQ ID NO: 98719 - protein, 15 aa, Severe acute respiratory syndrome coronavirus 2
QSYGFQPTNGVGYQP

SEQ ID NO: 98720 - protein, 15 aa, Severe acute respiratory syndrome coronavirus 2
YGFQPTNGVGYQPYR

SEQ ID NO: 98721 - protein, 15 aa, Severe acute respiratory syndrome coronavirus 2
GFQPTNGVGYQPYRV

SEQ ID NO: 98722 - protein, 15 aa, Severe acute respiratory syndrome coronavirus 2
FQPTNGVGYQPYRVV

SEQ ID NO: 98723 - protein, 15 aa, Severe acute respiratory syndrome coronavirus 2
QPTNGVGYQPYRVVV

SEQ ID NO: 98724 - protein, 15 aa, Severe acute respiratory syndrome coronavirus 2
PTNGVGYQPYRVVVL

SEQ ID NO: 98725 - protein, 15 aa, Severe acute respiratory syndrome coronavirus 2
TNGVGYQPYRVVVLS

SEQ ID NO: 98726 - protein, 15 aa, Severe acute respiratory syndrome coronavirus 2
NGVGYQPYRVVVLSF

SEQ ID NO: 98727 - protein, 15 aa, Severe acute respiratory syndrome coronavirus 2
GVGYQPYRVVVLSFE

SEQ ID NO: 98728 - protein, 15 aa, Severe acute respiratory syndrome coronavirus 2
VGYQPYRVVVLSFEL

SEQ ID NO: 98729 - protein, 15 aa, Severe acute respiratory syndrome coronavirus 2
GYQPYRVVVLSFELL

SEQ ID NO: 98730 - protein, 15 aa, Severe acute respiratory syndrome coronavirus 2
YQPYRVVVLSFELLH

SEQ ID NO: 98731 - protein, 15 aa, Severe acute respiratory syndrome coronavirus 2
GPKKSTNLVKNKCVN

SEQ ID NO: 98732 - protein, 15 aa, Severe acute respiratory syndrome coronavirus 2
PKKSTNLVKNKCVNF

SEQ ID NO: 98733 - protein, 15 aa, Severe acute respiratory syndrome coronavirus 2
KKSTNLVKNKCVNFN

SEQ ID NO: 98734 - protein, 15 aa, Severe acute respiratory syndrome coronavirus 2
KSTNLVKNKCVNFNF

SEQ ID NO: 98735 - protein, 15 aa, Severe acute respiratory syndrome coronavirus 2
STNLVKNKCVNFNFN

SEQ ID NO: 98736 - protein, 15 aa, Severe acute respiratory syndrome coronavirus 2
TNLVKNKCVNFNFNG

SEQ ID NO: 98737 - protein, 15 aa, Severe acute respiratory syndrome coronavirus 2
NLVKNKCVNFNFNGL

SEQ ID NO: 98738 - protein, 15 aa, Severe acute respiratory syndrome coronavirus 2
LVKNKCVNFNFNGLT

SEQ ID NO: 98739 - protein, 15 aa, Severe acute respiratory syndrome coronavirus 2
VKNKCVNFNFNGLTG

SEQ ID NO: 98740 - protein, 15 aa, Severe acute respiratory syndrome coronavirus 2
KNKCVNFNFNGLTGT

SEQ ID NO: 98741 - protein, 15 aa, Severe acute respiratory syndrome coronavirus 2
NKCVNFNFNGLTGTG

SEQ ID NO: 98742 - protein, 15 aa, Severe acute respiratory syndrome coronavirus 2
KCVNFNFNGLTGTGV

SEQ ID NO: 98743 - protein, 15 aa, Severe acute respiratory syndrome coronavirus 2
CVNFNFNGLTGTGVL

SEQ ID NO: 98744 - protein, 15 aa, Severe acute respiratory syndrome coronavirus 2
VNFNFNGLTGTGVLT

SEQ ID NO: 98745 - protein, 15 aa, Severe acute respiratory syndrome coronavirus 2
NFNFNGLTGTGVLTE

SEQ ID NO: 98746 - protein, 15 aa, Severe acute respiratory syndrome coronavirus 2
FNFNGLTGTGVLTES

SEQ ID NO: 98747 - protein, 15 aa, Severe acute respiratory syndrome coronavirus 2
NFNGLTGTGVLTESN

SEQ ID NO: 98748 - protein, 15 aa, Severe acute respiratory syndrome coronavirus 2
FNGLTGTGVLTESNK

SEQ ID NO: 98749 - protein, 15 aa, Severe acute respiratory syndrome coronavirus 2
GTGVLTESNKKFLPF

SEQ ID NO: 98750 - protein, 15 aa, Severe acute respiratory syndrome coronavirus 2
TGVLTESNKKFLPFQ

SEQ ID NO: 98751 - protein, 15 aa, Severe acute respiratory syndrome coronavirus 2
GVLTESNKKFLPFQQ

SEQ ID NO: 98752 - protein, 15 aa, Severe acute respiratory syndrome coronavirus 2
VLTESNKKFLPFQQF

SEQ ID NO: 98753 - protein, 15 aa, Severe acute respiratory syndrome coronavirus 2
LTESNKKFLPFQQFG

SEQ ID NO: 98754 - protein, 15 aa, Severe acute respiratory syndrome coronavirus 2
TESNKKFLPFQQFGR

SEQ ID NO: 98755 - protein, 15 aa, Severe acute respiratory syndrome coronavirus 2
VRDPQTLEILDITPC

SEQ ID NO: 98756 - protein, 15 aa, Severe acute respiratory syndrome coronavirus 2
RDPQTLEILDITPCS

SEQ ID NO: 98757 - protein, 15 aa, Severe acute respiratory syndrome coronavirus 2
DPQTLEILDITPCSF

SEQ ID NO: 98758 - protein, 15 aa, Severe acute respiratory syndrome coronavirus 2
PQTLEILDITPCSFG

SEQ ID NO: 98759 - protein, 15 aa, Severe acute respiratory syndrome coronavirus 2
QTLEILDITPCSFGG

SEQ ID NO: 98760 - protein, 15 aa, Severe acute respiratory syndrome coronavirus 2
TLEILDITPCSFGGV

SEQ ID NO: 98761 - protein, 15 aa, Severe acute respiratory syndrome coronavirus 2
LEILDITPCSFGGVS

SEQ ID NO: 98762 - protein, 15 aa, Severe acute respiratory syndrome coronavirus 2
ILDITPCSFGGVSVI

SEQ ID NO: 98763 - protein, 15 aa, Severe acute respiratory syndrome coronavirus 2
LDITPCSFGGVSVIT

SEQ ID NO: 98764 - protein, 15 aa, Severe acute respiratory syndrome coronavirus 2
DITPCSFGGVSVITP

SEQ ID NO: 98765 - protein, 15 aa, Severe acute respiratory syndrome coronavirus 2
ITPCSFGGVSVITPG

SEQ ID NO: 98766 - protein, 15 aa, Severe acute respiratory syndrome coronavirus 2
TPCSFGGVSVITPGT

SEQ ID NO: 98767 - protein, 15 aa, Severe acute respiratory syndrome coronavirus 2
DQLTPTWRVYSTGSN

SEQ ID NO: 98768 - protein, 15 aa, Severe acute respiratory syndrome coronavirus 2
QLTPTWRVYSTGSNV

SEQ ID NO: 98769 - protein, 15 aa, Severe acute respiratory syndrome coronavirus 2
LTPTWRVYSTGSNVF

SEQ ID NO: 98770 - protein, 15 aa, Severe acute respiratory syndrome coronavirus 2
TPTWRVYSTGSNVFQ

SEQ ID NO: 98771 - protein, 15 aa, Severe acute respiratory syndrome coronavirus 2
PTWRVYSTGSNVFQT

SEQ ID NO: 98772 - protein, 15 aa, Severe acute respiratory syndrome coronavirus 2
TWRVYSTGSNVFQTR

SEQ ID NO: 98773 - protein, 15 aa, Severe acute respiratory syndrome coronavirus 2
WRVYSTGSNVFQTRA

SEQ ID NO: 98774 - protein, 15 aa, Severe acute respiratory syndrome coronavirus 2
RVYSTGSNVFQTRAG

SEQ ID NO: 98775 - protein, 15 aa, Severe acute respiratory syndrome coronavirus 2
VYSTGSNVFQTRAGC

SEQ ID NO: 98776 - protein, 15 aa, Severe acute respiratory syndrome coronavirus 2
YSTGSNVFQTRAGCL

SEQ ID NO: 98777 - protein, 15 aa, Severe acute respiratory syndrome coronavirus 2
STGSNVFQTRAGCLI

SEQ ID NO: 98778 - protein, 15 aa, Severe acute respiratory syndrome coronavirus 2
TGSNVFQTRAGCLIG

SEQ ID NO: 98779 - protein, 15 aa, Severe acute respiratory syndrome coronavirus 2
GSNVFQTRAGCLIGA

SEQ ID NO: 98780 - protein, 15 aa, Severe acute respiratory syndrome coronavirus 2
NSYECDIPIGAGICA

SEQ ID NO: 98781 - protein, 15 aa, Severe acute respiratory syndrome coronavirus 2
SYECDIPIGAGICAS

SEQ ID NO: 98782 - protein, 15 aa, Severe acute respiratory syndrome coronavirus 2
YECDIPIGAGICASY

SEQ ID NO: 98783 - protein, 15 aa, Severe acute respiratory syndrome coronavirus 2
TEILPVSMTKTSVDC

SEQ ID NO: 98784 - protein, 15 aa, Severe acute respiratory syndrome coronavirus 2
EILPVSMTKTSVDCT

SEQ ID NO: 98785 - protein, 15 aa, Severe acute respiratory syndrome coronavirus 2
DSTECSNLLLQYGSF

SEQ ID NO: 98786 - protein, 15 aa, Severe acute respiratory syndrome coronavirus 2
STECSNLLLQYGSFC

SEQ ID NO: 98787 - protein, 15 aa, Severe acute respiratory syndrome coronavirus 2
TECSNLLLQYGSFCT

SEQ ID NO: 98788 - protein, 15 aa, Severe acute respiratory syndrome coronavirus 2
ECSNLLLQYGSFCTQ

SEQ ID NO: 98789 - protein, 15 aa, Severe acute respiratory syndrome coronavirus 2
CSNLLLQYGSFCTQL

SEQ ID NO: 98790 - protein, 15 aa, Severe acute respiratory syndrome coronavirus 2
SNLLLQYGSFCTQLN

SEQ ID NO: 98791 - protein, 15 aa, Severe acute respiratory syndrome coronavirus 2
FSQILPDPSKPSKRS

SEQ ID NO: 98792 - protein, 15 aa, Severe acute respiratory syndrome coronavirus 2
SQILPDPSKPSKRSF

SEQ ID NO: 98793 - protein, 15 aa, Severe acute respiratory syndrome coronavirus 2
VLPPLLTDEMIAQYT

SEQ ID NO: 98794 - protein, 15 aa, Severe acute respiratory syndrome coronavirus 2
LPPLLTDEMIAQYTS

SEQ ID NO: 98795 - protein, 15 aa, Severe acute respiratory syndrome coronavirus 2
PPLLTDEMIAQYTSA

SEQ ID NO: 98796 - protein, 15 aa, Severe acute respiratory syndrome coronavirus 2
PLLTDEMIAQYTSAL

SEQ ID NO: 98797 - protein, 15 aa, Severe acute respiratory syndrome coronavirus 2
LLTDEMIAQYTSALL

SEQ ID NO: 98798 - protein, 15 aa, Severe acute respiratory syndrome coronavirus 2
GWTFGAGAALQIPFA

SEQ ID NO: 98799 - protein, 15 aa, Severe acute respiratory syndrome coronavirus 2
WTFGAGAALQIPFAM

SEQ ID NO: 98800 - protein, 15 aa, Severe acute respiratory syndrome coronavirus 2
TFGAGAALQIPFAMQ

SEQ ID NO: 98801 - protein, 15 aa, Severe acute respiratory syndrome coronavirus 2
FGAGAALQIPFAMQM

SEQ ID NO: 98802 - protein, 15 aa, Severe acute respiratory syndrome coronavirus 2
GAGAALQIPFAMQMA

SEQ ID NO: 98803 - protein, 15 aa, Severe acute respiratory syndrome coronavirus 2
AGAALQIPFAMQMAY

SEQ ID NO: 98804 - protein, 15 aa, Severe acute respiratory syndrome coronavirus 2
GAALQIPFAMQMAYR

SEQ ID NO: 98805 - protein, 15 aa, Severe acute respiratory syndrome coronavirus 2
AALQIPFAMQMAYRF

SEQ ID NO: 98806 - protein, 15 aa, Severe acute respiratory syndrome coronavirus 2
ALQIPFAMQMAYRFN

SEQ ID NO: 98807 - protein, 15 aa, Severe acute respiratory syndrome coronavirus 2
LQIPFAMQMAYRFNG

SEQ ID NO: 98808 - protein, 15 aa, Severe acute respiratory syndrome coronavirus 2
QIPFAMQMAYRFNGI

SEQ ID NO: 98809 - protein, 15 aa, Severe acute respiratory syndrome coronavirus 2
IPFAMQMAYRFNGIG

SEQ ID NO: 98810 - protein, 15 aa, Severe acute respiratory syndrome coronavirus 2
PFAMQMAYRFNGIGV

SEQ ID NO: 98811 - protein, 15 aa, Severe acute respiratory syndrome coronavirus 2
FAMQMAYRFNGIGVT

SEQ ID NO: 98812 - protein, 15 aa, Severe acute respiratory syndrome coronavirus 2
AMQMAYRFNGIGVTQ

SEQ ID NO: 98813 - protein, 15 aa, Severe acute respiratory syndrome coronavirus 2
MQMAYRFNGIGVTQN

SEQ ID NO: 98814 - protein, 15 aa, Severe acute respiratory syndrome coronavirus 2
QMAYRFNGIGVTQNV

SEQ ID NO: 98815 - protein, 15 aa, Severe acute respiratory syndrome coronavirus 2
MAYRFNGIGVTQNVL

SEQ ID NO: 98816 - protein, 15 aa, Severe acute respiratory syndrome coronavirus 2
AYRFNGIGVTQNVLY

SEQ ID NO: 98817 - protein, 15 aa, Severe acute respiratory syndrome coronavirus 2
YRFNGIGVTQNVLYE

SEQ ID NO: 98818 - protein, 15 aa, Severe acute respiratory syndrome coronavirus 2
RFNGIGVTQNVLYEN

SEQ ID NO: 98819 - protein, 15 aa, Severe acute respiratory syndrome coronavirus 2
FNGIGVTQNVLYENQ

SEQ ID NO: 98820 - protein, 15 aa, Severe acute respiratory syndrome coronavirus 2
NGIGVTQNVLYENQK

SEQ ID NO: 98821 - protein, 15 aa, Severe acute respiratory syndrome coronavirus 2
GIGVTQNVLYENQKL

SEQ ID NO: 98822 - protein, 15 aa, Severe acute respiratory syndrome coronavirus 2
IGVTQNVLYENQKLI

SEQ ID NO: 98823 - protein, 15 aa, Severe acute respiratory syndrome coronavirus 2
GVTQNVLYENQKLIA

SEQ ID NO: 98824 - protein, 15 aa, Severe acute respiratory syndrome coronavirus 2
VTQNVLYENQKLIAN

SEQ ID NO: 98825 - protein, 15 aa, Severe acute respiratory syndrome coronavirus 2
TQNVLYENQKLIANQ

SEQ ID NO: 98826 - protein, 15 aa, Severe acute respiratory syndrome coronavirus 2
QNVLYENQKLIANQF

SEQ ID NO: 98827 - protein, 15 aa, Severe acute respiratory syndrome coronavirus 2
NVLYENQKLIANQFN

SEQ ID NO: 98828 - protein, 15 aa, Severe acute respiratory syndrome coronavirus 2
LVKQLSSNFGAISSV

SEQ ID NO: 98829 - protein, 15 aa, Severe acute respiratory syndrome coronavirus 2
VKQLSSNFGAISSVL

SEQ ID NO: 98830 - protein, 15 aa, Severe acute respiratory syndrome coronavirus 2
KQLSSNFGAISSVLN

SEQ ID NO: 98831 - protein, 15 aa, Severe acute respiratory syndrome coronavirus 2
QLSSNFGAISSVLND

SEQ ID NO: 98832 - protein, 15 aa, Severe acute respiratory syndrome coronavirus 2
LSSNFGAISSVLNDI

SEQ ID NO: 98833 - protein, 15 aa, Severe acute respiratory syndrome coronavirus 2
SSNFGAISSVLNDIL

SEQ ID NO: 98834 - protein, 15 aa, Severe acute respiratory syndrome coronavirus 2
SNFGAISSVLNDILS

SEQ ID NO: 98835 - protein, 15 aa, Severe acute respiratory syndrome coronavirus 2
NFGAISSVLNDILSR

SEQ ID NO: 98836 - protein, 15 aa, Severe acute respiratory syndrome coronavirus 2
FGAISSVLNDILSRL

SEQ ID NO: 98837 - protein, 15 aa, Severe acute respiratory syndrome coronavirus 2
GAISSVLNDILSRLD

SEQ ID NO: 98838 - protein, 15 aa, Severe acute respiratory syndrome coronavirus 2
AISSVLNDILSRLDK

SEQ ID NO: 98839 - protein, 15 aa, Severe acute respiratory syndrome coronavirus 2
ISSVLNDILSRLDKV

SEQ ID NO: 98840 - protein, 15 aa, Severe acute respiratory syndrome coronavirus 2
SSVLNDILSRLDKVE

SEQ ID NO: 98841 - protein, 15 aa, Severe acute respiratory syndrome coronavirus 2
SVLNDILSRLDKVEA

SEQ ID NO: 98842 - protein, 15 aa, Severe acute respiratory syndrome coronavirus 2
VLNDILSRLDKVEAE

SEQ ID NO: 98843 - protein, 15 aa, Severe acute respiratory syndrome coronavirus 2
LNDILSRLDKVEAEV

SEQ ID NO: 98844 - protein, 15 aa, Severe acute respiratory syndrome coronavirus 2
NDILSRLDKVEAEVQ

SEQ ID NO: 98845 - protein, 15 aa, Severe acute respiratory syndrome coronavirus 2
DILSRLDKVEAEVQI

SEQ ID NO: 98846 - protein, 15 aa, Severe acute respiratory syndrome coronavirus 2
ILSRLDKVEAEVQID

SEQ ID NO: 98847 - protein, 15 aa, Severe acute respiratory syndrome coronavirus 2
RLDKVEAEVQIDRLI

SEQ ID NO: 98848 - protein, 15 aa, Severe acute respiratory syndrome coronavirus 2
LDKVEAEVQIDRLIT

SEQ ID NO: 98849 - protein, 15 aa, Severe acute respiratory syndrome coronavirus 2
DKVEAEVQIDRLITG

SEQ ID NO: 98850 - protein, 15 aa, Severe acute respiratory syndrome coronavirus 2
KVEAEVQIDRLITGR

SEQ ID NO: 98851 - protein, 15 aa, Severe acute respiratory syndrome coronavirus 2
VEAEVQIDRLITGRL

SEQ ID NO: 98852 - protein, 15 aa, Severe acute respiratory syndrome coronavirus 2
EAEVQIDRLITGRLQ

SEQ ID NO: 98853 - protein, 15 aa, Severe acute respiratory syndrome coronavirus 2
AEVQIDRLITGRLQS

SEQ ID NO: 98854 - protein, 15 aa, Severe acute respiratory syndrome coronavirus 2
EVQIDRLITGRLQSL

SEQ ID NO: 98855 - protein, 15 aa, Severe acute respiratory syndrome coronavirus 2
VQIDRLITGRLQSLQ

SEQ ID NO: 98856 - protein, 15 aa, Severe acute respiratory syndrome coronavirus 2
QIDRLITGRLQSLQT

SEQ ID NO: 98857 - protein, 15 aa, Severe acute respiratory syndrome coronavirus 2
IDRLITGRLQSLQTY

SEQ ID NO: 98858 - protein, 15 aa, Severe acute respiratory syndrome coronavirus 2
DRLITGRLQSLQTYV

SEQ ID NO: 98859 - protein, 15 aa, Severe acute respiratory syndrome coronavirus 2
RLITGRLQSLQTYVT

SEQ ID NO: 98860 - protein, 15 aa, Severe acute respiratory syndrome coronavirus 2
LITGRLQSLQTYVTQ

SEQ ID NO: 98861 - protein, 15 aa, Severe acute respiratory syndrome coronavirus 2
ITGRLQSLQTYVTQQ

SEQ ID NO: 98862 - protein, 15 aa, Severe acute respiratory syndrome coronavirus 2
TGRLQSLQTYVTQQL

SEQ ID NO: 98863 - protein, 15 aa, Severe acute respiratory syndrome coronavirus 2
GRLQSLQTYVTQQLI

SEQ ID NO: 98864 - protein, 15 aa, Severe acute respiratory syndrome coronavirus 2
RLQSLQTYVTQQLIR

SEQ ID NO: 98865 - protein, 15 aa, Severe acute respiratory syndrome coronavirus 2
LQSLQTYVTQQLIRA

SEQ ID NO: 98866 - protein, 15 aa, Severe acute respiratory syndrome coronavirus 2
QSLQTYVTQQLIRAA

SEQ ID NO: 98867 - protein, 15 aa, Severe acute respiratory syndrome coronavirus 2
SLQTYVTQQLIRAAE

SEQ ID NO: 98868 - protein, 15 aa, Severe acute respiratory syndrome coronavirus 2
LQTYVTQQLIRAAEI

SEQ ID NO: 98869 - protein, 15 aa, Severe acute respiratory syndrome coronavirus 2
QTYVTQQLIRAAEIR

SEQ ID NO: 98870 - protein, 15 aa, Severe acute respiratory syndrome coronavirus 2
KMSECVLGQSKRVDF

SEQ ID NO: 98871 - protein, 15 aa, Severe acute respiratory syndrome coronavirus 2
MSECVLGQSKRVDFC

SEQ ID NO: 98872 - protein, 15 aa, Severe acute respiratory syndrome coronavirus 2
SECVLGQSKRVDFCG

SEQ ID NO: 98873 - protein, 15 aa, Severe acute respiratory syndrome coronavirus 2
ECVLGQSKRVDFCGK

SEQ ID NO: 98874 - protein, 15 aa, Severe acute respiratory syndrome coronavirus 2
CVLGQSKRVDFCGKG

SEQ ID NO: 98875 - protein, 15 aa, Severe acute respiratory syndrome coronavirus 2
QSKRVDFCGKGYHLM

SEQ ID NO: 98876 - protein, 15 aa, Severe acute respiratory syndrome coronavirus 2
SKRVDFCGKGYHLMS

SEQ ID NO: 98877 - protein, 15 aa, Severe acute respiratory syndrome coronavirus 2
KRVDFCGKGYHLMSF

SEQ ID NO: 98878 - protein, 15 aa, Severe acute respiratory syndrome coronavirus 2
RVDFCGKGYHLMSFP

SEQ ID NO: 98879 - protein, 15 aa, Severe acute respiratory syndrome coronavirus 2
VDFCGKGYHLMSFPQ

SEQ ID NO: 98880 - protein, 15 aa, Severe acute respiratory syndrome coronavirus 2
DFCGKGYHLMSFPQS

SEQ ID NO: 98881 - protein, 15 aa, Severe acute respiratory syndrome coronavirus 2
FCGKGYHLMSFPQSA

SEQ ID NO: 98882 - protein, 15 aa, Severe acute respiratory syndrome coronavirus 2
CGKGYHLMSFPQSAP

SEQ ID NO: 98883 - protein, 15 aa, Severe acute respiratory syndrome coronavirus 2
GKGYHLMSFPQSAPH

SEQ ID NO: 98884 - protein, 15 aa, Severe acute respiratory syndrome coronavirus 2
KGYHLMSFPQSAPHG

SEQ ID NO: 98885 - protein, 15 aa, Severe acute respiratory syndrome coronavirus 2
GYHLMSFPQSAPHGV

SEQ ID NO: 98886 - protein, 15 aa, Severe acute respiratory syndrome coronavirus 2
YHLMSFPQSAPHGVV

SEQ ID NO: 98887 - protein, 15 aa, Severe acute respiratory syndrome coronavirus 2
HLMSFPQSAPHGVVF

SEQ ID NO: 98888 - protein, 15 aa, Severe acute respiratory syndrome coronavirus 2
LMSFPQSAPHGVVFL

SEQ ID NO: 98889 - protein, 15 aa, Severe acute respiratory syndrome coronavirus 2
MSFPQSAPHGVVFLH

SEQ ID NO: 98890 - protein, 15 aa, Severe acute respiratory syndrome coronavirus 2
SFPQSAPHGVVFLHV

SEQ ID NO: 98891 - protein, 15 aa, Severe acute respiratory syndrome coronavirus 2
FPQSAPHGVVFLHVT

SEQ ID NO: 98892 - protein, 15 aa, Severe acute respiratory syndrome coronavirus 2
PQSAPHGVVFLHVTY

SEQ ID NO: 98893 - protein, 15 aa, Severe acute respiratory syndrome coronavirus 2
QSAPHGVVFLHVTYV

SEQ ID NO: 98894 - protein, 15 aa, Severe acute respiratory syndrome coronavirus 2
SAPHGVVFLHVTYVP

SEQ ID NO: 98895 - protein, 15 aa, Severe acute respiratory syndrome coronavirus 2
APHGVVFLHVTYVPA

SEQ ID NO: 98896 - protein, 15 aa, Severe acute respiratory syndrome coronavirus 2
PHGVVFLHVTYVPAQ

SEQ ID NO: 98897 - protein, 15 aa, Severe acute respiratory syndrome coronavirus 2
HGVVFLHVTYVPAQE

SEQ ID NO: 98898 - protein, 15 aa, Severe acute respiratory syndrome coronavirus 2
GVVFLHVTYVPAQEK

SEQ ID NO: 98899 - protein, 15 aa, Severe acute respiratory syndrome coronavirus 2
WFVTQRNFYEPQIIT

SEQ ID NO: 98900 - protein, 15 aa, Severe acute respiratory syndrome coronavirus 2
FVTQRNFYEPQIITT

SEQ ID NO: 98901 - protein, 15 aa, Severe acute respiratory syndrome coronavirus 2
VTQRNFYEPQIITTD

SEQ ID NO: 98902 - protein, 15 aa, Severe acute respiratory syndrome coronavirus 2
TQRNFYEPQIITTDN

SEQ ID NO: 98903 - protein, 15 aa, Severe acute respiratory syndrome coronavirus 2
QRNFYEPQIITTDNT

SEQ ID NO: 98904 - protein, 15 aa, Severe acute respiratory syndrome coronavirus 2
RNFYEPQIITTDNTF

SEQ ID NO: 98905 - protein, 15 aa, Severe acute respiratory syndrome coronavirus 2
IQKEIDRLNEVAKNL

SEQ ID NO: 98906 - protein, 16 aa, Severe acute respiratory syndrome coronavirus 2
NIIRGWIFGTTLDSKT

SEQ ID NO: 98907 - protein, 16 aa, Severe acute respiratory syndrome coronavirus 2
IIRGWIFGTTLDSKTQ

SEQ ID NO: 98908 - protein, 16 aa, Severe acute respiratory syndrome coronavirus 2
IRGWIFGTTLDSKTQS

SEQ ID NO: 98909 - protein, 16 aa, Severe acute respiratory syndrome coronavirus 2
RGWIFGTTLDSKTQSL

SEQ ID NO: 98910 - protein, 16 aa, Severe acute respiratory syndrome coronavirus 2
GWIFGTTLDSKTQSLL

SEQ ID NO: 98911 - protein, 16 aa, Severe acute respiratory syndrome coronavirus 2
WIFGTTLDSKTQSLLI

SEQ ID NO: 98912 - protein, 16 aa, Severe acute respiratory syndrome coronavirus 2
FKNLREFVFKNIDGYF

SEQ ID NO: 98913 - protein, 16 aa, Severe acute respiratory syndrome coronavirus 2
KNLREFVFKNIDGYFK

SEQ ID NO: 98914 - protein, 16 aa, Severe acute respiratory syndrome coronavirus 2
NLREFVFKNIDGYFKI

SEQ ID NO: 98915 - protein, 16 aa, Severe acute respiratory syndrome coronavirus 2
LREFVFKNIDGYFKIY

SEQ ID NO: 98916 - protein, 16 aa, Severe acute respiratory syndrome coronavirus 2
REFVFKNIDGYFKIYS

SEQ ID NO: 98917 - protein, 16 aa, Severe acute respiratory syndrome coronavirus 2
EFVFKNIDGYFKIYSK

SEQ ID NO: 98918 - protein, 16 aa, Severe acute respiratory syndrome coronavirus 2
FVFKNIDGYFKIYSKH

SEQ ID NO: 98919 - protein, 16 aa, Severe acute respiratory syndrome coronavirus 2
VFKNIDGYFKIYSKHT

SEQ ID NO: 98920 - protein, 16 aa, Severe acute respiratory syndrome coronavirus 2
FKNIDGYFKIYSKHTP

SEQ ID NO: 98921 - protein, 16 aa, Severe acute respiratory syndrome coronavirus 2
KNIDGYFKIYSKHTPI

SEQ ID NO: 98922 - protein, 16 aa, Severe acute respiratory syndrome coronavirus 2
NIDGYFKIYSKHTPIN

SEQ ID NO: 98923 - protein, 16 aa, Severe acute respiratory syndrome coronavirus 2
IDGYFKIYSKHTPINL

SEQ ID NO: 98924 - protein, 16 aa, Severe acute respiratory syndrome coronavirus 2
DGYFKIYSKHTPINLV

SEQ ID NO: 98925 - protein, 16 aa, Severe acute respiratory syndrome coronavirus 2
GYFKIYSKHTPINLVR

SEQ ID NO: 98926 - protein, 16 aa, Severe acute respiratory syndrome coronavirus 2
LPQGFSALEPLVDLPI

SEQ ID NO: 98927 - protein, 16 aa, Severe acute respiratory syndrome coronavirus 2
PQGFSALEPLVDLPIG

SEQ ID NO: 98928 - protein, 16 aa, Severe acute respiratory syndrome coronavirus 2
QGFSALEPLVDLPIGI

SEQ ID NO: 98929 - protein, 16 aa, Severe acute respiratory syndrome coronavirus 2
AYYVGYLQPRTFLLKY

SEQ ID NO: 98930 - protein, 16 aa, Severe acute respiratory syndrome coronavirus 2
YYVGYLQPRTFLLKYN

SEQ ID NO: 98931 - protein, 16 aa, Severe acute respiratory syndrome coronavirus 2
GTITDAVDCALDPLSE

SEQ ID NO: 98932 - protein, 16 aa, Severe acute respiratory syndrome coronavirus 2
TITDAVDCALDPLSET

SEQ ID NO: 98933 - protein, 16 aa, Severe acute respiratory syndrome coronavirus 2
ITDAVDCALDPLSETK

SEQ ID NO: 98934 - protein, 16 aa, Severe acute respiratory syndrome coronavirus 2
GIYQTSNFRVQPTESI

SEQ ID NO: 98935 - protein, 16 aa, Severe acute respiratory syndrome coronavirus 2
IYQTSNFRVQPTESIV

SEQ ID NO: 98936 - protein, 16 aa, Severe acute respiratory syndrome coronavirus 2
YQTSNFRVQPTESIVR

SEQ ID NO: 98937 - protein, 16 aa, Severe acute respiratory syndrome coronavirus 2
QTSNFRVQPTESIVRF

SEQ ID NO: 98938 - protein, 16 aa, Severe acute respiratory syndrome coronavirus 2
TRFASVYAWNRKRISN

SEQ ID NO: 98939 - protein, 16 aa, Severe acute respiratory syndrome coronavirus 2
RFASVYAWNRKRISNC

SEQ ID NO: 98940 - protein, 16 aa, Severe acute respiratory syndrome coronavirus 2
FASVYAWNRKRISNCV

SEQ ID NO: 98941 - protein, 16 aa, Severe acute respiratory syndrome coronavirus 2
ASVYAWNRKRISNCVA

SEQ ID NO: 98942 - protein, 16 aa, Severe acute respiratory syndrome coronavirus 2
SVYAWNRKRISNCVAD

SEQ ID NO: 98943 - protein, 16 aa, Severe acute respiratory syndrome coronavirus 2
VYAWNRKRISNCVADY

SEQ ID NO: 98944 - protein, 16 aa, Severe acute respiratory syndrome coronavirus 2
YAWNRKRISNCVADYS

SEQ ID NO: 98945 - protein, 16 aa, Severe acute respiratory syndrome coronavirus 2
LYNSASFSTFKCYGVS

SEQ ID NO: 98946 - protein, 16 aa, Severe acute respiratory syndrome coronavirus 2
TKLNDLCFTNVYADSF

SEQ ID NO: 98947 - protein, 16 aa, Severe acute respiratory syndrome coronavirus 2
KLNDLCFTNVYADSFV

SEQ ID NO: 98948 - protein, 16 aa, Severe acute respiratory syndrome coronavirus 2
LNDLCFTNVYADSFVI

SEQ ID NO: 98949 - protein, 16 aa, Severe acute respiratory syndrome coronavirus 2
NDLCFTNVYADSFVIR

SEQ ID NO: 98950 - protein, 16 aa, Severe acute respiratory syndrome coronavirus 2
DLCFTNVYADSFVIRG

SEQ ID NO: 98951 - protein, 16 aa, Severe acute respiratory syndrome coronavirus 2
LCFTNVYADSFVIRGD

SEQ ID NO: 98952 - protein, 16 aa, Severe acute respiratory syndrome coronavirus 2
CFTNVYADSFVIRGDE

SEQ ID NO: 98953 - protein, 16 aa, Severe acute respiratory syndrome coronavirus 2
FTNVYADSFVIRGDEV

SEQ ID NO: 98954 - protein, 16 aa, Severe acute respiratory syndrome coronavirus 2
TNVYADSFVIRGDEVR

SEQ ID NO: 98955 - protein, 16 aa, Severe acute respiratory syndrome coronavirus 2
NVYADSFVIRGDEVRQ

SEQ ID NO: 98956 - protein, 16 aa, Severe acute respiratory syndrome coronavirus 2
VYADSFVIRGDEVRQI

SEQ ID NO: 98957 - protein, 16 aa, Severe acute respiratory syndrome coronavirus 2
YADSFVIRGDEVRQIA

SEQ ID NO: 98958 - protein, 16 aa, Severe acute respiratory syndrome coronavirus 2
ADSFVIRGDEVRQIAP

SEQ ID NO: 98959 - protein, 16 aa, Severe acute respiratory syndrome coronavirus 2
DSFVIRGDEVRQIAPG

SEQ ID NO: 98960 - protein, 16 aa, Severe acute respiratory syndrome coronavirus 2
RGDEVRQIAPGQTGKI

SEQ ID NO: 98961 - protein, 16 aa, Severe acute respiratory syndrome coronavirus 2
GDEVRQIAPGQTGKIA

SEQ ID NO: 98962 - protein, 16 aa, Severe acute respiratory syndrome coronavirus 2
DEVRQIAPGQTGKIAD

SEQ ID NO: 98963 - protein, 16 aa, Severe acute respiratory syndrome coronavirus 2
EVRQIAPGQTGKIADY

SEQ ID NO: 98964 - protein, 16 aa, Severe acute respiratory syndrome coronavirus 2
VRQIAPGQTGKIADYN

SEQ ID NO: 98965 - protein, 16 aa, Severe acute respiratory syndrome coronavirus 2
RQIAPGQTGKIADYNY

SEQ ID NO: 98966 - protein, 16 aa, Severe acute respiratory syndrome coronavirus 2
QIAPGQTGKIADYNYK

SEQ ID NO: 98967 - protein, 16 aa, Severe acute respiratory syndrome coronavirus 2
IAPGQTGKIADYNYKL

SEQ ID NO: 98968 - protein, 16 aa, Severe acute respiratory syndrome coronavirus 2
NYKLPDDFTGCVIAWN

SEQ ID NO: 98969 - protein, 16 aa, Severe acute respiratory syndrome coronavirus 2
YKLPDDFTGCVIAWNS

SEQ ID NO: 98970 - protein, 16 aa, Severe acute respiratory syndrome coronavirus 2
KLPDDFTGCVIAWNSN

SEQ ID NO: 98971 - protein, 16 aa, Severe acute respiratory syndrome coronavirus 2
LPDDFTGCVIAWNSNN

SEQ ID NO: 98972 - protein, 16 aa, Severe acute respiratory syndrome coronavirus 2
PDDFTGCVIAWNSNNL

SEQ ID NO: 98973 - protein, 16 aa, Severe acute respiratory syndrome coronavirus 2
DDFTGCVIAWNSNNLD

SEQ ID NO: 98974 - protein, 16 aa, Severe acute respiratory syndrome coronavirus 2
DFTGCVIAWNSNNLDS

SEQ ID NO: 98975 - protein, 16 aa, Severe acute respiratory syndrome coronavirus 2
FTGCVIAWNSNNLDSK

SEQ ID NO: 98976 - protein, 16 aa, Severe acute respiratory syndrome coronavirus 2
TGCVIAWNSNNLDSKV

SEQ ID NO: 98977 - protein, 16 aa, Severe acute respiratory syndrome coronavirus 2
GCVIAWNSNNLDSKVG

SEQ ID NO: 98978 - protein, 16 aa, Severe acute respiratory syndrome coronavirus 2
CVIAWNSNNLDSKVGG

SEQ ID NO: 98979 - protein, 16 aa, Severe acute respiratory syndrome coronavirus 2
VIAWNSNNLDSKVGGN

SEQ ID NO: 98980 - protein, 16 aa, Severe acute respiratory syndrome coronavirus 2
NLDSKVGGNYNYLYRL

SEQ ID NO: 98981 - protein, 16 aa, Severe acute respiratory syndrome coronavirus 2
LDSKVGGNYNYLYRLF

SEQ ID NO: 98982 - protein, 16 aa, Severe acute respiratory syndrome coronavirus 2
DSKVGGNYNYLYRLFR

SEQ ID NO: 98983 - protein, 16 aa, Severe acute respiratory syndrome coronavirus 2
SKVGGNYNYLYRLFRK

SEQ ID NO: 98984 - protein, 16 aa, Severe acute respiratory syndrome coronavirus 2
KVGGNYNYLYRLFRKS

SEQ ID NO: 98985 - protein, 16 aa, Severe acute respiratory syndrome coronavirus 2
VGGNYNYLYRLFRKSN

SEQ ID NO: 98986 - protein, 16 aa, Severe acute respiratory syndrome coronavirus 2
GGNYNYLYRLFRKSNL

SEQ ID NO: 98987 - protein, 16 aa, Severe acute respiratory syndrome coronavirus 2
GNYNYLYRLFRKSNLK

SEQ ID NO: 98988 - protein, 16 aa, Severe acute respiratory syndrome coronavirus 2
NYNYLYRLFRKSNLKP

SEQ ID NO: 98989 - protein, 16 aa, Severe acute respiratory syndrome coronavirus 2
YNYLYRLFRKSNLKPF

SEQ ID NO: 98990 - protein, 16 aa, Severe acute respiratory syndrome coronavirus 2
NYLYRLFRKSNLKPFE

SEQ ID NO: 98991 - protein, 16 aa, Severe acute respiratory syndrome coronavirus 2
YLYRLFRKSNLKPFER

SEQ ID NO: 98992 - protein, 16 aa, Severe acute respiratory syndrome coronavirus 2
LYRLFRKSNLKPFERD

SEQ ID NO: 98993 - protein, 16 aa, Severe acute respiratory syndrome coronavirus 2
LQSYGFQPTNGVGYQP

SEQ ID NO: 98994 - protein, 16 aa, Severe acute respiratory syndrome coronavirus 2
YGFQPTNGVGYQPYRV

SEQ ID NO: 98995 - protein, 16 aa, Severe acute respiratory syndrome coronavirus 2
FQPTNGVGYQPYRVVV

SEQ ID NO: 98996 - protein, 16 aa, Severe acute respiratory syndrome coronavirus 2
QPTNGVGYQPYRVVVL

SEQ ID NO: 98997 - protein, 16 aa, Severe acute respiratory syndrome coronavirus 2
PTNGVGYQPYRVVVLS

SEQ ID NO: 98998 - protein, 16 aa, Severe acute respiratory syndrome coronavirus 2
TNGVGYQPYRVVVLSF

SEQ ID NO: 98999 - protein, 16 aa, Severe acute respiratory syndrome coronavirus 2
NGVGYQPYRVVVLSFE

SEQ ID NO: 99000 - protein, 16 aa, Severe acute respiratory syndrome coronavirus 2
GVGYQPYRVVVLSFEL

SEQ ID NO: 99001 - protein, 16 aa, Severe acute respiratory syndrome coronavirus 2
VGYQPYRVVVLSFELL

SEQ ID NO: 99002 - protein, 16 aa, Severe acute respiratory syndrome coronavirus 2
GYQPYRVVVLSFELLH

SEQ ID NO: 99003 - protein, 16 aa, Severe acute respiratory syndrome coronavirus 2
GPKKSTNLVKNKCVNF

SEQ ID NO: 99004 - protein, 16 aa, Severe acute respiratory syndrome coronavirus 2
PKKSTNLVKNKCVNFN

SEQ ID NO: 99005 - protein, 16 aa, Severe acute respiratory syndrome coronavirus 2
KKSTNLVKNKCVNFNF

SEQ ID NO: 99006 - protein, 16 aa, Severe acute respiratory syndrome coronavirus 2
KSTNLVKNKCVNFNFN

SEQ ID NO: 99007 - protein, 16 aa, Severe acute respiratory syndrome coronavirus 2
STNLVKNKCVNFNFNG

SEQ ID NO: 99008 - protein, 16 aa, Severe acute respiratory syndrome coronavirus 2
TNLVKNKCVNFNFNGL

SEQ ID NO: 99009 - protein, 16 aa, Severe acute respiratory syndrome coronavirus 2
NLVKNKCVNFNFNGLT

SEQ ID NO: 99010 - protein, 16 aa, Severe acute respiratory syndrome coronavirus 2
LVKNKCVNFNFNGLTG

SEQ ID NO: 99011 - protein, 16 aa, Severe acute respiratory syndrome coronavirus 2
VKNKCVNFNFNGLTGT

SEQ ID NO: 99012 - protein, 16 aa, Severe acute respiratory syndrome coronavirus 2
KNKCVNFNFNGLTGTG

SEQ ID NO: 99013 - protein, 16 aa, Severe acute respiratory syndrome coronavirus 2
NKCVNFNFNGLTGTGV

SEQ ID NO: 99014 - protein, 16 aa, Severe acute respiratory syndrome coronavirus 2
KCVNFNFNGLTGTGVL

SEQ ID NO: 99015 - protein, 16 aa, Severe acute respiratory syndrome coronavirus 2
CVNFNFNGLTGTGVLT

SEQ ID NO: 99016 - protein, 16 aa, Severe acute respiratory syndrome coronavirus 2
VNFNFNGLTGTGVLTE

SEQ ID NO: 99017 - protein, 16 aa, Severe acute respiratory syndrome coronavirus 2
NFNFNGLTGTGVLTES

SEQ ID NO: 99018 - protein, 16 aa, Severe acute respiratory syndrome coronavirus 2
FNFNGLTGTGVLTESN

SEQ ID NO: 99019 - protein, 16 aa, Severe acute respiratory syndrome coronavirus 2
NFNGLTGTGVLTESNK

SEQ ID NO: 99020 - protein, 16 aa, Severe acute respiratory syndrome coronavirus 2
GVLTESNKKFLPFQQF

SEQ ID NO: 99021 - protein, 16 aa, Severe acute respiratory syndrome coronavirus 2
VLTESNKKFLPFQQFG

SEQ ID NO: 99022 - protein, 16 aa, Severe acute respiratory syndrome coronavirus 2
LTESNKKFLPFQQFGR

SEQ ID NO: 99023 - protein, 16 aa, Severe acute respiratory syndrome coronavirus 2
VRDPQTLEILDITPCS

SEQ ID NO: 99024 - protein, 16 aa, Severe acute respiratory syndrome coronavirus 2
RDPQTLEILDITPCSF

SEQ ID NO: 99025 - protein, 16 aa, Severe acute respiratory syndrome coronavirus 2
DPQTLEILDITPCSFG

SEQ ID NO: 99026 - protein, 16 aa, Severe acute respiratory syndrome coronavirus 2
PQTLEILDITPCSFGG

SEQ ID NO: 99027 - protein, 16 aa, Severe acute respiratory syndrome coronavirus 2
QTLEILDITPCSFGGV

SEQ ID NO: 99028 - protein, 16 aa, Severe acute respiratory syndrome coronavirus 2
TLEILDITPCSFGGVS

SEQ ID NO: 99029 - protein, 16 aa, Severe acute respiratory syndrome coronavirus 2
LEILDITPCSFGGVSV

SEQ ID NO: 99030 - protein, 16 aa, Severe acute respiratory syndrome coronavirus 2
EILDITPCSFGGVSVI

SEQ ID NO: 99031 - protein, 16 aa, Severe acute respiratory syndrome coronavirus 2
ILDITPCSFGGVSVIT

SEQ ID NO: 99032 - protein, 16 aa, Severe acute respiratory syndrome coronavirus 2
LDITPCSFGGVSVITP

SEQ ID NO: 99033 - protein, 16 aa, Severe acute respiratory syndrome coronavirus 2
DITPCSFGGVSVITPG

SEQ ID NO: 99034 - protein, 16 aa, Severe acute respiratory syndrome coronavirus 2
ITPCSFGGVSVITPGT

SEQ ID NO: 99035 - protein, 16 aa, Severe acute respiratory syndrome coronavirus 2
QLTPTWRVYSTGSNVF

SEQ ID NO: 99036 - protein, 16 aa, Severe acute respiratory syndrome coronavirus 2
LTPTWRVYSTGSNVFQ

SEQ ID NO: 99037 - protein, 16 aa, Severe acute respiratory syndrome coronavirus 2
TPTWRVYSTGSNVFQT

SEQ ID NO: 99038 - protein, 16 aa, Severe acute respiratory syndrome coronavirus 2
PTWRVYSTGSNVFQTR

SEQ ID NO: 99039 - protein, 16 aa, Severe acute respiratory syndrome coronavirus 2
TWRVYSTGSNVFQTRA

SEQ ID NO: 99040 - protein, 16 aa, Severe acute respiratory syndrome coronavirus 2
WRVYSTGSNVFQTRAG

SEQ ID NO: 99041 - protein, 16 aa, Severe acute respiratory syndrome coronavirus 2
RVYSTGSNVFQTRAGC

SEQ ID NO: 99042 - protein, 16 aa, Severe acute respiratory syndrome coronavirus 2
VYSTGSNVFQTRAGCL

SEQ ID NO: 99043 - protein, 16 aa, Severe acute respiratory syndrome coronavirus 2
YSTGSNVFQTRAGCLI

SEQ ID NO: 99044 - protein, 16 aa, Severe acute respiratory syndrome coronavirus 2
STGSNVFQTRAGCLIG

SEQ ID NO: 99045 - protein, 16 aa, Severe acute respiratory syndrome coronavirus 2
TGSNVFQTRAGCLIGA

SEQ ID NO: 99046 - protein, 16 aa, Severe acute respiratory syndrome coronavirus 2
NSYECDIPIGAGICAS

SEQ ID NO: 99047 - protein, 16 aa, Severe acute respiratory syndrome coronavirus 2
SYECDIPIGAGICASY

SEQ ID NO: 99048 - protein, 16 aa, Severe acute respiratory syndrome coronavirus 2
DSTECSNLLLQYGSFC

SEQ ID NO: 99049 - protein, 16 aa, Severe acute respiratory syndrome coronavirus 2
STECSNLLLQYGSFCT

SEQ ID NO: 99050 - protein, 16 aa, Severe acute respiratory syndrome coronavirus 2
TECSNLLLQYGSFCTQ

SEQ ID NO: 99051 - protein, 16 aa, Severe acute respiratory syndrome coronavirus 2
ECSNLLLQYGSFCTQL

SEQ ID NO: 99052 - protein, 16 aa, Severe acute respiratory syndrome coronavirus 2
CSNLLLQYGSFCTQLN

SEQ ID NO: 99053 - protein, 16 aa, Severe acute respiratory syndrome coronavirus 2
FSQILPDPSKPSKRSF

SEQ ID NO: 99054 - protein, 16 aa, Severe acute respiratory syndrome coronavirus 2
VLPPLLTDEMIAQYTS

SEQ ID NO: 99055 - protein, 16 aa, Severe acute respiratory syndrome coronavirus 2
LPPLLTDEMIAQYTSA

SEQ ID NO: 99056 - protein, 16 aa, Severe acute respiratory syndrome coronavirus 2
PPLLTDEMIAQYTSAL

SEQ ID NO: 99057 - protein, 16 aa, Severe acute respiratory syndrome coronavirus 2
PLLTDEMIAQYTSALL

SEQ ID NO: 99058 - protein, 16 aa, Severe acute respiratory syndrome coronavirus 2
GWTFGAGAALQIPFAM

SEQ ID NO: 99059 - protein, 16 aa, Severe acute respiratory syndrome coronavirus 2
WTFGAGAALQIPFAMQ

SEQ ID NO: 99060 - protein, 16 aa, Severe acute respiratory syndrome coronavirus 2
TFGAGAALQIPFAMQM

SEQ ID NO: 99061 - protein, 16 aa, Severe acute respiratory syndrome coronavirus 2
FGAGAALQIPFAMQMA

SEQ ID NO: 99062 - protein, 16 aa, Severe acute respiratory syndrome coronavirus 2
GAGAALQIPFAMQMAY

SEQ ID NO: 99063 - protein, 16 aa, Severe acute respiratory syndrome coronavirus 2
AGAALQIPFAMQMAYR

SEQ ID NO: 99064 - protein, 16 aa, Severe acute respiratory syndrome coronavirus 2
GAALQIPFAMQMAYRF

SEQ ID NO: 99065 - protein, 16 aa, Severe acute respiratory syndrome coronavirus 2
AALQIPFAMQMAYRFN

SEQ ID NO: 99066 - protein, 16 aa, Severe acute respiratory syndrome coronavirus 2
ALQIPFAMQMAYRFNG

SEQ ID NO: 99067 - protein, 16 aa, Severe acute respiratory syndrome coronavirus 2
LQIPFAMQMAYRFNGI

SEQ ID NO: 99068 - protein, 16 aa, Severe acute respiratory syndrome coronavirus 2
QIPFAMQMAYRFNGIG

SEQ ID NO: 99069 - protein, 16 aa, Severe acute respiratory syndrome coronavirus 2
IPFAMQMAYRFNGIGV

SEQ ID NO: 99070 - protein, 16 aa, Severe acute respiratory syndrome coronavirus 2
PFAMQMAYRFNGIGVT

SEQ ID NO: 99071 - protein, 16 aa, Severe acute respiratory syndrome coronavirus 2
FAMQMAYRFNGIGVTQ

SEQ ID NO: 99072 - protein, 16 aa, Severe acute respiratory syndrome coronavirus 2
AMQMAYRFNGIGVTQN

SEQ ID NO: 99073 - protein, 16 aa, Severe acute respiratory syndrome coronavirus 2
MQMAYRFNGIGVTQNV

SEQ ID NO: 99074 - protein, 16 aa, Severe acute respiratory syndrome coronavirus 2
QMAYRFNGIGVTQNVL

SEQ ID NO: 99075 - protein, 16 aa, Severe acute respiratory syndrome coronavirus 2
MAYRFNGIGVTQNVLY

SEQ ID NO: 99076 - protein, 16 aa, Severe acute respiratory syndrome coronavirus 2
AYRFNGIGVTQNVLYE

SEQ ID NO: 99077 - protein, 16 aa, Severe acute respiratory syndrome coronavirus 2
YRFNGIGVTQNVLYEN

SEQ ID NO: 99078 - protein, 16 aa, Severe acute respiratory syndrome coronavirus 2
RFNGIGVTQNVLYENQ

SEQ ID NO: 99079 - protein, 16 aa, Severe acute respiratory syndrome coronavirus 2
FNGIGVTQNVLYENQK

SEQ ID NO: 99080 - protein, 16 aa, Severe acute respiratory syndrome coronavirus 2
NGIGVTQNVLYENQKL

SEQ ID NO: 99081 - protein, 16 aa, Severe acute respiratory syndrome coronavirus 2
GIGVTQNVLYENQKLI

SEQ ID NO: 99082 - protein, 16 aa, Severe acute respiratory syndrome coronavirus 2
IGVTQNVLYENQKLIA

SEQ ID NO: 99083 - protein, 16 aa, Severe acute respiratory syndrome coronavirus 2
GVTQNVLYENQKLIAN

SEQ ID NO: 99084 - protein, 16 aa, Severe acute respiratory syndrome coronavirus 2
VTQNVLYENQKLIANQ

SEQ ID NO: 99085 - protein, 16 aa, Severe acute respiratory syndrome coronavirus 2
TQNVLYENQKLIANQF

SEQ ID NO: 99086 - protein, 16 aa, Severe acute respiratory syndrome coronavirus 2
QNVLYENQKLIANQFN

SEQ ID NO: 99087 - protein, 16 aa, Severe acute respiratory syndrome coronavirus 2
LVKQLSSNFGAISSVL

SEQ ID NO: 99088 - protein, 16 aa, Severe acute respiratory syndrome coronavirus 2
VKQLSSNFGAISSVLN

SEQ ID NO: 99089 - protein, 16 aa, Severe acute respiratory syndrome coronavirus 2
KQLSSNFGAISSVLND

SEQ ID NO: 99090 - protein, 16 aa, Severe acute respiratory syndrome coronavirus 2
QLSSNFGAISSVLNDI

SEQ ID NO: 99091 - protein, 16 aa, Severe acute respiratory syndrome coronavirus 2
LSSNFGAISSVLNDIL

SEQ ID NO: 99092 - protein, 16 aa, Severe acute respiratory syndrome coronavirus 2
SSNFGAISSVLNDILS

SEQ ID NO: 99093 - protein, 16 aa, Severe acute respiratory syndrome coronavirus 2
SNFGAISSVLNDILSR

SEQ ID NO: 99094 - protein, 16 aa, Severe acute respiratory syndrome coronavirus 2
NFGAISSVLNDILSRL

SEQ ID NO: 99095 - protein, 16 aa, Severe acute respiratory syndrome coronavirus 2
FGAISSVLNDILSRLD

SEQ ID NO: 99096 - protein, 16 aa, Severe acute respiratory syndrome coronavirus 2
GAISSVLNDILSRLDK

SEQ ID NO: 99097 - protein, 16 aa, Severe acute respiratory syndrome coronavirus 2
AISSVLNDILSRLDKV

SEQ ID NO: 99098 - protein, 16 aa, Severe acute respiratory syndrome coronavirus 2
ISSVLNDILSRLDKVE

SEQ ID NO: 99099 - protein, 16 aa, Severe acute respiratory syndrome coronavirus 2
SSVLNDILSRLDKVEA

SEQ ID NO: 99100 - protein, 16 aa, Severe acute respiratory syndrome coronavirus 2
SVLNDILSRLDKVEAE

SEQ ID NO: 99101 - protein, 16 aa, Severe acute respiratory syndrome coronavirus 2
VLNDILSRLDKVEAEV

SEQ ID NO: 99102 - protein, 16 aa, Severe acute respiratory syndrome coronavirus 2
LNDILSRLDKVEAEVQ

SEQ ID NO: 99103 - protein, 16 aa, Severe acute respiratory syndrome coronavirus 2
NDILSRLDKVEAEVQI

SEQ ID NO: 99104 - protein, 16 aa, Severe acute respiratory syndrome coronavirus 2
DILSRLDKVEAEVQID

SEQ ID NO: 99105 - protein, 16 aa, Severe acute respiratory syndrome coronavirus 2
ILSRLDKVEAEVQIDR

SEQ ID NO: 99106 - protein, 16 aa, Severe acute respiratory syndrome coronavirus 2
LSRLDKVEAEVQIDRL

SEQ ID NO: 99107 - protein, 16 aa, Severe acute respiratory syndrome coronavirus 2
SRLDKVEAEVQIDRLI

SEQ ID NO: 99108 - protein, 16 aa, Severe acute respiratory syndrome coronavirus 2
RLDKVEAEVQIDRLIT

SEQ ID NO: 99109 - protein, 16 aa, Severe acute respiratory syndrome coronavirus 2
LDKVEAEVQIDRLITG

SEQ ID NO: 99110 - protein, 16 aa, Severe acute respiratory syndrome coronavirus 2
DKVEAEVQIDRLITGR

SEQ ID NO: 99111 - protein, 16 aa, Severe acute respiratory syndrome coronavirus 2
KVEAEVQIDRLITGRL

SEQ ID NO: 99112 - protein, 16 aa, Severe acute respiratory syndrome coronavirus 2
VEAEVQIDRLITGRLQ

SEQ ID NO: 99113 - protein, 16 aa, Severe acute respiratory syndrome coronavirus 2
EAEVQIDRLITGRLQS

SEQ ID NO: 99114 - protein, 16 aa, Severe acute respiratory syndrome coronavirus 2
AEVQIDRLITGRLQSL

SEQ ID NO: 99115 - protein, 16 aa, Severe acute respiratory syndrome coronavirus 2
EVQIDRLITGRLQSLQ

SEQ ID NO: 99116 - protein, 16 aa, Severe acute respiratory syndrome coronavirus 2
VQIDRLITGRLQSLQT

SEQ ID NO: 99117 - protein, 16 aa, Severe acute respiratory syndrome coronavirus 2
QIDRLITGRLQSLQTY

SEQ ID NO: 99118 - protein, 16 aa, Severe acute respiratory syndrome coronavirus 2
IDRLITGRLQSLQTYV

SEQ ID NO: 99119 - protein, 16 aa, Severe acute respiratory syndrome coronavirus 2
DRLITGRLQSLQTYVT

SEQ ID NO: 99120 - protein, 16 aa, Severe acute respiratory syndrome coronavirus 2
RLITGRLQSLQTYVTQ

SEQ ID NO: 99121 - protein, 16 aa, Severe acute respiratory syndrome coronavirus 2
LITGRLQSLQTYVTQQ

SEQ ID NO: 99122 - protein, 16 aa, Severe acute respiratory syndrome coronavirus 2
ITGRLQSLQTYVTQQL

SEQ ID NO: 99123 - protein, 16 aa, Severe acute respiratory syndrome coronavirus 2
TGRLQSLQTYVTQQLI

SEQ ID NO: 99124 - protein, 16 aa, Severe acute respiratory syndrome coronavirus 2
GRLQSLQTYVTQQLIR

SEQ ID NO: 99125 - protein, 16 aa, Severe acute respiratory syndrome coronavirus 2
RLQSLQTYVTQQLIRA

SEQ ID NO: 99126 - protein, 16 aa, Severe acute respiratory syndrome coronavirus 2
LQSLQTYVTQQLIRAA

SEQ ID NO: 99127 - protein, 16 aa, Severe acute respiratory syndrome coronavirus 2
QSLQTYVTQQLIRAAE

SEQ ID NO: 99128 - protein, 16 aa, Severe acute respiratory syndrome coronavirus 2
SLQTYVTQQLIRAAEI

SEQ ID NO: 99129 - protein, 16 aa, Severe acute respiratory syndrome coronavirus 2
LQTYVTQQLIRAAEIR

SEQ ID NO: 99130 - protein, 16 aa, Severe acute respiratory syndrome coronavirus 2
KMSECVLGQSKRVDFC

SEQ ID NO: 99131 - protein, 16 aa, Severe acute respiratory syndrome coronavirus 2
MSECVLGQSKRVDFCG

SEQ ID NO: 99132 - protein, 16 aa, Severe acute respiratory syndrome coronavirus 2
SECVLGQSKRVDFCGK

SEQ ID NO: 99133 - protein, 16 aa, Severe acute respiratory syndrome coronavirus 2
SKRVDFCGKGYHLMSF

SEQ ID NO: 99134 - protein, 16 aa, Severe acute respiratory syndrome coronavirus 2
KRVDFCGKGYHLMSFP

SEQ ID NO: 99135 - protein, 16 aa, Severe acute respiratory syndrome coronavirus 2
RVDFCGKGYHLMSFPQ

SEQ ID NO: 99136 - protein, 16 aa, Severe acute respiratory syndrome coronavirus 2
VDFCGKGYHLMSFPQS

SEQ ID NO: 99137 - protein, 16 aa, Severe acute respiratory syndrome coronavirus 2
DFCGKGYHLMSFPQSA

SEQ ID NO: 99138 - protein, 16 aa, Severe acute respiratory syndrome coronavirus 2
FCGKGYHLMSFPQSAP

SEQ ID NO: 99139 - protein, 16 aa, Severe acute respiratory syndrome coronavirus 2
CGKGYHLMSFPQSAPH

SEQ ID NO: 99140 - protein, 16 aa, Severe acute respiratory syndrome coronavirus 2
GKGYHLMSFPQSAPHG

SEQ ID NO: 99141 - protein, 16 aa, Severe acute respiratory syndrome coronavirus 2
KGYHLMSFPQSAPHGV

SEQ ID NO: 99142 - protein, 16 aa, Severe acute respiratory syndrome coronavirus 2
GYHLMSFPQSAPHGVV

SEQ ID NO: 99143 - protein, 16 aa, Severe acute respiratory syndrome coronavirus 2
YHLMSFPQSAPHGVVF

SEQ ID NO: 99144 - protein, 16 aa, Severe acute respiratory syndrome coronavirus 2
HLMSFPQSAPHGVVFL

SEQ ID NO: 99145 - protein, 16 aa, Severe acute respiratory syndrome coronavirus 2
LMSFPQSAPHGVVFLH

SEQ ID NO: 99146 - protein, 16 aa, Severe acute respiratory syndrome coronavirus 2
MSFPQSAPHGVVFLHV

SEQ ID NO: 99147 - protein, 16 aa, Severe acute respiratory syndrome coronavirus 2
SFPQSAPHGVVFLHVT

SEQ ID NO: 99148 - protein, 16 aa, Severe acute respiratory syndrome coronavirus 2
FPQSAPHGVVFLHVTY

SEQ ID NO: 99149 - protein, 16 aa, Severe acute respiratory syndrome coronavirus 2
PQSAPHGVVFLHVTYV

SEQ ID NO: 99150 - protein, 16 aa, Severe acute respiratory syndrome coronavirus 2
QSAPHGVVFLHVTYVP

SEQ ID NO: 99151 - protein, 16 aa, Severe acute respiratory syndrome coronavirus 2
SAPHGVVFLHVTYVPA

SEQ ID NO: 99152 - protein, 16 aa, Severe acute respiratory syndrome coronavirus 2
APHGVVFLHVTYVPAQ

SEQ ID NO: 99153 - protein, 16 aa, Severe acute respiratory syndrome coronavirus 2
PHGVVFLHVTYVPAQE

SEQ ID NO: 99154 - protein, 16 aa, Severe acute respiratory syndrome coronavirus 2
HGVVFLHVTYVPAQEK

SEQ ID NO: 99155 - protein, 16 aa, Severe acute respiratory syndrome coronavirus 2
WFVTQRNFYEPQIITT

SEQ ID NO: 99156 - protein, 16 aa, Severe acute respiratory syndrome coronavirus 2
FVTQRNFYEPQIITTD

SEQ ID NO: 99157 - protein, 16 aa, Severe acute respiratory syndrome coronavirus 2
VTQRNFYEPQIITTDN

SEQ ID NO: 99158 - protein, 16 aa, Severe acute respiratory syndrome coronavirus 2
TQRNFYEPQIITTDNT

SEQ ID NO: 99159 - protein, 16 aa, Severe acute respiratory syndrome coronavirus 2
QRNFYEPQIITTDNTF

SEQ ID NO: 99160 - protein, 16 aa, Severe acute respiratory syndrome coronavirus 2
VNIQKEIDRLNEVAKN

SEQ ID NO: 99161 - protein, 16 aa, Severe acute respiratory syndrome coronavirus 2
NIQKEIDRLNEVAKNL

SEQ ID NO: 99162 - protein, 17 aa, Severe acute respiratory syndrome coronavirus 2
NIIRGWIFGTTLDSKTQ

SEQ ID NO: 99163 - protein, 17 aa, Severe acute respiratory syndrome coronavirus 2
IIRGWIFGTTLDSKTQS

SEQ ID NO: 99164 - protein, 17 aa, Severe acute respiratory syndrome coronavirus 2
IRGWIFGTTLDSKTQSL

SEQ ID NO: 99165 - protein, 17 aa, Severe acute respiratory syndrome coronavirus 2
RGWIFGTTLDSKTQSLL

SEQ ID NO: 99166 - protein, 17 aa, Severe acute respiratory syndrome coronavirus 2
GWIFGTTLDSKTQSLLI

SEQ ID NO: 99167 - protein, 17 aa, Severe acute respiratory syndrome coronavirus 2
KNLREFVFKNIDGYFKI

SEQ ID NO: 99168 - protein, 17 aa, Severe acute respiratory syndrome coronavirus 2
NLREFVFKNIDGYFKIY

SEQ ID NO: 99169 - protein, 17 aa, Severe acute respiratory syndrome coronavirus 2
LREFVFKNIDGYFKIYS

SEQ ID NO: 99170 - protein, 17 aa, Severe acute respiratory syndrome coronavirus 2
REFVFKNIDGYFKIYSK

SEQ ID NO: 99171 - protein, 17 aa, Severe acute respiratory syndrome coronavirus 2
EFVFKNIDGYFKIYSKH

SEQ ID NO: 99172 - protein, 17 aa, Severe acute respiratory syndrome coronavirus 2
FVFKNIDGYFKIYSKHT

SEQ ID NO: 99173 - protein, 17 aa, Severe acute respiratory syndrome coronavirus 2
VFKNIDGYFKIYSKHTP

SEQ ID NO: 99174 - protein, 17 aa, Severe acute respiratory syndrome coronavirus 2
FKNIDGYFKIYSKHTPI

SEQ ID NO: 99175 - protein, 17 aa, Severe acute respiratory syndrome coronavirus 2
KNIDGYFKIYSKHTPIN

SEQ ID NO: 99176 - protein, 17 aa, Severe acute respiratory syndrome coronavirus 2
NIDGYFKIYSKHTPINL

SEQ ID NO: 99177 - protein, 17 aa, Severe acute respiratory syndrome coronavirus 2
IDGYFKIYSKHTPINLV

SEQ ID NO: 99178 - protein, 17 aa, Severe acute respiratory syndrome coronavirus 2
DGYFKIYSKHTPINLVR

SEQ ID NO: 99179 - protein, 17 aa, Severe acute respiratory syndrome coronavirus 2
LPQGFSALEPLVDLPIG

SEQ ID NO: 99180 - protein, 17 aa, Severe acute respiratory syndrome coronavirus 2
PQGFSALEPLVDLPIGI

SEQ ID NO: 99181 - protein, 17 aa, Severe acute respiratory syndrome coronavirus 2
AYYVGYLQPRTFLLKYN

SEQ ID NO: 99182 - protein, 17 aa, Severe acute respiratory syndrome coronavirus 2
GTITDAVDCALDPLSET

SEQ ID NO: 99183 - protein, 17 aa, Severe acute respiratory syndrome coronavirus 2
TITDAVDCALDPLSETK

SEQ ID NO: 99184 - protein, 17 aa, Severe acute respiratory syndrome coronavirus 2
GIYQTSNFRVQPTESIV

SEQ ID NO: 99185 - protein, 17 aa, Severe acute respiratory syndrome coronavirus 2
IYQTSNFRVQPTESIVR

SEQ ID NO: 99186 - protein, 17 aa, Severe acute respiratory syndrome coronavirus 2
YQTSNFRVQPTESIVRF

SEQ ID NO: 99187 - protein, 17 aa, Severe acute respiratory syndrome coronavirus 2
TRFASVYAWNRKRISNC

SEQ ID NO: 99188 - protein, 17 aa, Severe acute respiratory syndrome coronavirus 2
RFASVYAWNRKRISNCV

SEQ ID NO: 99189 - protein, 17 aa, Severe acute respiratory syndrome coronavirus 2
FASVYAWNRKRISNCVA

SEQ ID NO: 99190 - protein, 17 aa, Severe acute respiratory syndrome coronavirus 2
ASVYAWNRKRISNCVAD

SEQ ID NO: 99191 - protein, 17 aa, Severe acute respiratory syndrome coronavirus 2
SVYAWNRKRISNCVADY

SEQ ID NO: 99192 - protein, 17 aa, Severe acute respiratory syndrome coronavirus 2
VYAWNRKRISNCVADYS

SEQ ID NO: 99193 - protein, 17 aa, Severe acute respiratory syndrome coronavirus 2
TKLNDLCFTNVYADSFV

SEQ ID NO: 99194 - protein, 17 aa, Severe acute respiratory syndrome coronavirus 2
KLNDLCFTNVYADSFVI

SEQ ID NO: 99195 - protein, 17 aa, Severe acute respiratory syndrome coronavirus 2
LNDLCFTNVYADSFVIR

SEQ ID NO: 99196 - protein, 17 aa, Severe acute respiratory syndrome coronavirus 2
NDLCFTNVYADSFVIRG

SEQ ID NO: 99197 - protein, 17 aa, Severe acute respiratory syndrome coronavirus 2
DLCFTNVYADSFVIRGD

SEQ ID NO: 99198 - protein, 17 aa, Severe acute respiratory syndrome coronavirus 2
LCFTNVYADSFVIRGDE

SEQ ID NO: 99199 - protein, 17 aa, Severe acute respiratory syndrome coronavirus 2
CFTNVYADSFVIRGDEV

SEQ ID NO: 99200 - protein, 17 aa, Severe acute respiratory syndrome coronavirus 2
FTNVYADSFVIRGDEVR

SEQ ID NO: 99201 - protein, 17 aa, Severe acute respiratory syndrome coronavirus 2
TNVYADSFVIRGDEVRQ

SEQ ID NO: 99202 - protein, 17 aa, Severe acute respiratory syndrome coronavirus 2
NVYADSFVIRGDEVRQI

SEQ ID NO: 99203 - protein, 17 aa, Severe acute respiratory syndrome coronavirus 2
VYADSFVIRGDEVRQIA

SEQ ID NO: 99204 - protein, 17 aa, Severe acute respiratory syndrome coronavirus 2
YADSFVIRGDEVRQIAP

SEQ ID NO: 99205 - protein, 17 aa, Severe acute respiratory syndrome coronavirus 2
ADSFVIRGDEVRQIAPG

SEQ ID NO: 99206 - protein, 17 aa, Severe acute respiratory syndrome coronavirus 2
RGDEVRQIAPGQTGKIA

SEQ ID NO: 99207 - protein, 17 aa, Severe acute respiratory syndrome coronavirus 2
GDEVRQIAPGQTGKIAD

SEQ ID NO: 99208 - protein, 17 aa, Severe acute respiratory syndrome coronavirus 2
DEVRQIAPGQTGKIADY

SEQ ID NO: 99209 - protein, 17 aa, Severe acute respiratory syndrome coronavirus 2
EVRQIAPGQTGKIADYN

SEQ ID NO: 99210 - protein, 17 aa, Severe acute respiratory syndrome coronavirus 2
VRQIAPGQTGKIADYNY

SEQ ID NO: 99211 - protein, 17 aa, Severe acute respiratory syndrome coronavirus 2
RQIAPGQTGKIADYNYK

SEQ ID NO: 99212 - protein, 17 aa, Severe acute respiratory syndrome coronavirus 2
QIAPGQTGKIADYNYKL

SEQ ID NO: 99213 - protein, 17 aa, Severe acute respiratory syndrome coronavirus 2
IAPGQTGKIADYNYKLP

SEQ ID NO: 99214 - protein, 17 aa, Severe acute respiratory syndrome coronavirus 2
YNYKLPDDFTGCVIAWN

SEQ ID NO: 99215 - protein, 17 aa, Severe acute respiratory syndrome coronavirus 2
NYKLPDDFTGCVIAWNS

SEQ ID NO: 99216 - protein, 17 aa, Severe acute respiratory syndrome coronavirus 2
YKLPDDFTGCVIAWNSN

SEQ ID NO: 99217 - protein, 17 aa, Severe acute respiratory syndrome coronavirus 2
KLPDDFTGCVIAWNSNN

SEQ ID NO: 99218 - protein, 17 aa, Severe acute respiratory syndrome coronavirus 2
LPDDFTGCVIAWNSNNL

SEQ ID NO: 99219 - protein, 17 aa, Severe acute respiratory syndrome coronavirus 2
PDDFTGCVIAWNSNNLD

SEQ ID NO: 99220 - protein, 17 aa, Severe acute respiratory syndrome coronavirus 2
DDFTGCVIAWNSNNLDS

SEQ ID NO: 99221 - protein, 17 aa, Severe acute respiratory syndrome coronavirus 2
DFTGCVIAWNSNNLDSK

SEQ ID NO: 99222 - protein, 17 aa, Severe acute respiratory syndrome coronavirus 2
FTGCVIAWNSNNLDSKV

SEQ ID NO: 99223 - protein, 17 aa, Severe acute respiratory syndrome coronavirus 2
TGCVIAWNSNNLDSKVG

SEQ ID NO: 99224 - protein, 17 aa, Severe acute respiratory syndrome coronavirus 2
GCVIAWNSNNLDSKVGG

SEQ ID NO: 99225 - protein, 17 aa, Severe acute respiratory syndrome coronavirus 2
CVIAWNSNNLDSKVGGN

SEQ ID NO: 99226 - protein, 17 aa, Severe acute respiratory syndrome coronavirus 2
VIAWNSNNLDSKVGGNY

SEQ ID NO: 99227 - protein, 17 aa, Severe acute respiratory syndrome coronavirus 2
NNLDSKVGGNYNYLYRL

SEQ ID NO: 99228 - protein, 17 aa, Severe acute respiratory syndrome coronavirus 2
NLDSKVGGNYNYLYRLF

SEQ ID NO: 99229 - protein, 17 aa, Severe acute respiratory syndrome coronavirus 2
LDSKVGGNYNYLYRLFR

SEQ ID NO: 99230 - protein, 17 aa, Severe acute respiratory syndrome coronavirus 2
DSKVGGNYNYLYRLFRK

SEQ ID NO: 99231 - protein, 17 aa, Severe acute respiratory syndrome coronavirus 2
SKVGGNYNYLYRLFRKS

SEQ ID NO: 99232 - protein, 17 aa, Severe acute respiratory syndrome coronavirus 2
KVGGNYNYLYRLFRKSN

SEQ ID NO: 99233 - protein, 17 aa, Severe acute respiratory syndrome coronavirus 2
VGGNYNYLYRLFRKSNL

SEQ ID NO: 99234 - protein, 17 aa, Severe acute respiratory syndrome coronavirus 2
GGNYNYLYRLFRKSNLK

SEQ ID NO: 99235 - protein, 17 aa, Severe acute respiratory syndrome coronavirus 2
GNYNYLYRLFRKSNLKP

SEQ ID NO: 99236 - protein, 17 aa, Severe acute respiratory syndrome coronavirus 2
NYNYLYRLFRKSNLKPF

SEQ ID NO: 99237 - protein, 17 aa, Severe acute respiratory syndrome coronavirus 2
YNYLYRLFRKSNLKPFE

SEQ ID NO: 99238 - protein, 17 aa, Severe acute respiratory syndrome coronavirus 2
NYLYRLFRKSNLKPFER

SEQ ID NO: 99239 - protein, 17 aa, Severe acute respiratory syndrome coronavirus 2
YLYRLFRKSNLKPFERD

SEQ ID NO: 99240 - protein, 17 aa, Severe acute respiratory syndrome coronavirus 2
YGFQPTNGVGYQPYRVV

SEQ ID NO: 99241 - protein, 17 aa, Severe acute respiratory syndrome coronavirus 2
GFQPTNGVGYQPYRVVV

SEQ ID NO: 99242 - protein, 17 aa, Severe acute respiratory syndrome coronavirus 2
FQPTNGVGYQPYRVVVL

SEQ ID NO: 99243 - protein, 17 aa, Severe acute respiratory syndrome coronavirus 2
QPTNGVGYQPYRVVVLS

SEQ ID NO: 99244 - protein, 17 aa, Severe acute respiratory syndrome coronavirus 2
PTNGVGYQPYRVVVLSF

SEQ ID NO: 99245 - protein, 17 aa, Severe acute respiratory syndrome coronavirus 2
TNGVGYQPYRVVVLSFE

SEQ ID NO: 99246 - protein, 17 aa, Severe acute respiratory syndrome coronavirus 2
NGVGYQPYRVVVLSFEL

SEQ ID NO: 99247 - protein, 17 aa, Severe acute respiratory syndrome coronavirus 2
GVGYQPYRVVVLSFELL

SEQ ID NO: 99248 - protein, 17 aa, Severe acute respiratory syndrome coronavirus 2
VGYQPYRVVVLSFELLH

SEQ ID NO: 99249 - protein, 17 aa, Severe acute respiratory syndrome coronavirus 2
CGPKKSTNLVKNKCVNF

SEQ ID NO: 99250 - protein, 17 aa, Severe acute respiratory syndrome coronavirus 2
GPKKSTNLVKNKCVNFN

SEQ ID NO: 99251 - protein, 17 aa, Severe acute respiratory syndrome coronavirus 2
PKKSTNLVKNKCVNFNF

SEQ ID NO: 99252 - protein, 17 aa, Severe acute respiratory syndrome coronavirus 2
KKSTNLVKNKCVNFNFN

SEQ ID NO: 99253 - protein, 17 aa, Severe acute respiratory syndrome coronavirus 2
KSTNLVKNKCVNFNFNG

SEQ ID NO: 99254 - protein, 17 aa, Severe acute respiratory syndrome coronavirus 2
STNLVKNKCVNFNFNGL

SEQ ID NO: 99255 - protein, 17 aa, Severe acute respiratory syndrome coronavirus 2
TNLVKNKCVNFNFNGLT

SEQ ID NO: 99256 - protein, 17 aa, Severe acute respiratory syndrome coronavirus 2
NLVKNKCVNFNFNGLTG

SEQ ID NO: 99257 - protein, 17 aa, Severe acute respiratory syndrome coronavirus 2
LVKNKCVNFNFNGLTGT

SEQ ID NO: 99258 - protein, 17 aa, Severe acute respiratory syndrome coronavirus 2
VKNKCVNFNFNGLTGTG

SEQ ID NO: 99259 - protein, 17 aa, Severe acute respiratory syndrome coronavirus 2
KNKCVNFNFNGLTGTGV

SEQ ID NO: 99260 - protein, 17 aa, Severe acute respiratory syndrome coronavirus 2
NKCVNFNFNGLTGTGVL

SEQ ID NO: 99261 - protein, 17 aa, Severe acute respiratory syndrome coronavirus 2
KCVNFNFNGLTGTGVLT

SEQ ID NO: 99262 - protein, 17 aa, Severe acute respiratory syndrome coronavirus 2
CVNFNFNGLTGTGVLTE

SEQ ID NO: 99263 - protein, 17 aa, Severe acute respiratory syndrome coronavirus 2
VNFNFNGLTGTGVLTES

SEQ ID NO: 99264 - protein, 17 aa, Severe acute respiratory syndrome coronavirus 2
NFNFNGLTGTGVLTESN

SEQ ID NO: 99265 - protein, 17 aa, Severe acute respiratory syndrome coronavirus 2
FNFNGLTGTGVLTESNK

SEQ ID NO: 99266 - protein, 17 aa, Severe acute respiratory syndrome coronavirus 2
TGVLTESNKKFLPFQQF

SEQ ID NO: 99267 - protein, 17 aa, Severe acute respiratory syndrome coronavirus 2
GVLTESNKKFLPFQQFG

SEQ ID NO: 99268 - protein, 17 aa, Severe acute respiratory syndrome coronavirus 2
VLTESNKKFLPFQQFGR

SEQ ID NO: 99269 - protein, 17 aa, Severe acute respiratory syndrome coronavirus 2
VRDPQTLEILDITPCSF

SEQ ID NO: 99270 - protein, 17 aa, Severe acute respiratory syndrome coronavirus 2
RDPQTLEILDITPCSFG

SEQ ID NO: 99271 - protein, 17 aa, Severe acute respiratory syndrome coronavirus 2
DPQTLEILDITPCSFGG

SEQ ID NO: 99272 - protein, 17 aa, Severe acute respiratory syndrome coronavirus 2
PQTLEILDITPCSFGGV

SEQ ID NO: 99273 - protein, 17 aa, Severe acute respiratory syndrome coronavirus 2
QTLEILDITPCSFGGVS

SEQ ID NO: 99274 - protein, 17 aa, Severe acute respiratory syndrome coronavirus 2
TLEILDITPCSFGGVSV

SEQ ID NO: 99275 - protein, 17 aa, Severe acute respiratory syndrome coronavirus 2
LEILDITPCSFGGVSVI

SEQ ID NO: 99276 - protein, 17 aa, Severe acute respiratory syndrome coronavirus 2
EILDITPCSFGGVSVIT

SEQ ID NO: 99277 - protein, 17 aa, Severe acute respiratory syndrome coronavirus 2
ILDITPCSFGGVSVITP

SEQ ID NO: 99278 - protein, 17 aa, Severe acute respiratory syndrome coronavirus 2
LDITPCSFGGVSVITPG

SEQ ID NO: 99279 - protein, 17 aa, Severe acute respiratory syndrome coronavirus 2
DITPCSFGGVSVITPGT

SEQ ID NO: 99280 - protein, 17 aa, Severe acute respiratory syndrome coronavirus 2
QLTPTWRVYSTGSNVFQ

SEQ ID NO: 99281 - protein, 17 aa, Severe acute respiratory syndrome coronavirus 2
LTPTWRVYSTGSNVFQT

SEQ ID NO: 99282 - protein, 17 aa, Severe acute respiratory syndrome coronavirus 2
TPTWRVYSTGSNVFQTR

SEQ ID NO: 99283 - protein, 17 aa, Severe acute respiratory syndrome coronavirus 2
PTWRVYSTGSNVFQTRA

SEQ ID NO: 99284 - protein, 17 aa, Severe acute respiratory syndrome coronavirus 2
TWRVYSTGSNVFQTRAG

SEQ ID NO: 99285 - protein, 17 aa, Severe acute respiratory syndrome coronavirus 2
WRVYSTGSNVFQTRAGC

SEQ ID NO: 99286 - protein, 17 aa, Severe acute respiratory syndrome coronavirus 2
RVYSTGSNVFQTRAGCL

SEQ ID NO: 99287 - protein, 17 aa, Severe acute respiratory syndrome coronavirus 2
VYSTGSNVFQTRAGCLI

SEQ ID NO: 99288 - protein, 17 aa, Severe acute respiratory syndrome coronavirus 2
YSTGSNVFQTRAGCLIG

SEQ ID NO: 99289 - protein, 17 aa, Severe acute respiratory syndrome coronavirus 2
STGSNVFQTRAGCLIGA

SEQ ID NO: 99290 - protein, 17 aa, Severe acute respiratory syndrome coronavirus 2
NSYECDIPIGAGICASY

SEQ ID NO: 99291 - protein, 17 aa, Severe acute respiratory syndrome coronavirus 2
GDSTECSNLLLQYGSFC

SEQ ID NO: 99292 - protein, 17 aa, Severe acute respiratory syndrome coronavirus 2
DSTECSNLLLQYGSFCT

SEQ ID NO: 99293 - protein, 17 aa, Severe acute respiratory syndrome coronavirus 2
STECSNLLLQYGSFCTQ

SEQ ID NO: 99294 - protein, 17 aa, Severe acute respiratory syndrome coronavirus 2
TECSNLLLQYGSFCTQL

SEQ ID NO: 99295 - protein, 17 aa, Severe acute respiratory syndrome coronavirus 2
ECSNLLLQYGSFCTQLN

SEQ ID NO: 99296 - protein, 17 aa, Severe acute respiratory syndrome coronavirus 2
VLPPLLTDEMIAQYTSA

SEQ ID NO: 99297 - protein, 17 aa, Severe acute respiratory syndrome coronavirus 2
LPPLLTDEMIAQYTSAL

SEQ ID NO: 99298 - protein, 17 aa, Severe acute respiratory syndrome coronavirus 2
PPLLTDEMIAQYTSALL

SEQ ID NO: 99299 - protein, 17 aa, Severe acute respiratory syndrome coronavirus 2
GWTFGAGAALQIPFAMQ

SEQ ID NO: 99300 - protein, 17 aa, Severe acute respiratory syndrome coronavirus 2
WTFGAGAALQIPFAMQM

SEQ ID NO: 99301 - protein, 17 aa, Severe acute respiratory syndrome coronavirus 2
TFGAGAALQIPFAMQMA

SEQ ID NO: 99302 - protein, 17 aa, Severe acute respiratory syndrome coronavirus 2
FGAGAALQIPFAMQMAY

SEQ ID NO: 99303 - protein, 17 aa, Severe acute respiratory syndrome coronavirus 2
GAGAALQIPFAMQMAYR

SEQ ID NO: 99304 - protein, 17 aa, Severe acute respiratory syndrome coronavirus 2
AGAALQIPFAMQMAYRF

SEQ ID NO: 99305 - protein, 17 aa, Severe acute respiratory syndrome coronavirus 2
GAALQIPFAMQMAYRFN

SEQ ID NO: 99306 - protein, 17 aa, Severe acute respiratory syndrome coronavirus 2
AALQIPFAMQMAYRFNG

SEQ ID NO: 99307 - protein, 17 aa, Severe acute respiratory syndrome coronavirus 2
ALQIPFAMQMAYRFNGI

SEQ ID NO: 99308 - protein, 17 aa, Severe acute respiratory syndrome coronavirus 2
LQIPFAMQMAYRFNGIG

SEQ ID NO: 99309 - protein, 17 aa, Severe acute respiratory syndrome coronavirus 2
QIPFAMQMAYRFNGIGV

SEQ ID NO: 99310 - protein, 17 aa, Severe acute respiratory syndrome coronavirus 2
IPFAMQMAYRFNGIGVT

SEQ ID NO: 99311 - protein, 17 aa, Severe acute respiratory syndrome coronavirus 2
PFAMQMAYRFNGIGVTQ

SEQ ID NO: 99312 - protein, 17 aa, Severe acute respiratory syndrome coronavirus 2
FAMQMAYRFNGIGVTQN

SEQ ID NO: 99313 - protein, 17 aa, Severe acute respiratory syndrome coronavirus 2
AMQMAYRFNGIGVTQNV

SEQ ID NO: 99314 - protein, 17 aa, Severe acute respiratory syndrome coronavirus 2
MQMAYRFNGIGVTQNVL

SEQ ID NO: 99315 - protein, 17 aa, Severe acute respiratory syndrome coronavirus 2
QMAYRFNGIGVTQNVLY

SEQ ID NO: 99316 - protein, 17 aa, Severe acute respiratory syndrome coronavirus 2
MAYRFNGIGVTQNVLYE

SEQ ID NO: 99317 - protein, 17 aa, Severe acute respiratory syndrome coronavirus 2
AYRFNGIGVTQNVLYEN

SEQ ID NO: 99318 - protein, 17 aa, Severe acute respiratory syndrome coronavirus 2
YRFNGIGVTQNVLYENQ

SEQ ID NO: 99319 - protein, 17 aa, Severe acute respiratory syndrome coronavirus 2
RFNGIGVTQNVLYENQK

SEQ ID NO: 99320 - protein, 17 aa, Severe acute respiratory syndrome coronavirus 2
FNGIGVTQNVLYENQKL

SEQ ID NO: 99321 - protein, 17 aa, Severe acute respiratory syndrome coronavirus 2
NGIGVTQNVLYENQKLI

SEQ ID NO: 99322 - protein, 17 aa, Severe acute respiratory syndrome coronavirus 2
GIGVTQNVLYENQKLIA

SEQ ID NO: 99323 - protein, 17 aa, Severe acute respiratory syndrome coronavirus 2
IGVTQNVLYENQKLIAN

SEQ ID NO: 99324 - protein, 17 aa, Severe acute respiratory syndrome coronavirus 2
GVTQNVLYENQKLIANQ

SEQ ID NO: 99325 - protein, 17 aa, Severe acute respiratory syndrome coronavirus 2
VTQNVLYENQKLIANQF

SEQ ID NO: 99326 - protein, 17 aa, Severe acute respiratory syndrome coronavirus 2
TQNVLYENQKLIANQFN

SEQ ID NO: 99327 - protein, 17 aa, Severe acute respiratory syndrome coronavirus 2
LVKQLSSNFGAISSVLN

SEQ ID NO: 99328 - protein, 17 aa, Severe acute respiratory syndrome coronavirus 2
VKQLSSNFGAISSVLND

SEQ ID NO: 99329 - protein, 17 aa, Severe acute respiratory syndrome coronavirus 2
KQLSSNFGAISSVLNDI

SEQ ID NO: 99330 - protein, 17 aa, Severe acute respiratory syndrome coronavirus 2
QLSSNFGAISSVLNDIL

SEQ ID NO: 99331 - protein, 17 aa, Severe acute respiratory syndrome coronavirus 2
LSSNFGAISSVLNDILS

SEQ ID NO: 99332 - protein, 17 aa, Severe acute respiratory syndrome coronavirus 2
SSNFGAISSVLNDILSR

SEQ ID NO: 99333 - protein, 17 aa, Severe acute respiratory syndrome coronavirus 2
SNFGAISSVLNDILSRL

SEQ ID NO: 99334 - protein, 17 aa, Severe acute respiratory syndrome coronavirus 2
NFGAISSVLNDILSRLD

SEQ ID NO: 99335 - protein, 17 aa, Severe acute respiratory syndrome coronavirus 2
FGAISSVLNDILSRLDK

SEQ ID NO: 99336 - protein, 17 aa, Severe acute respiratory syndrome coronavirus 2
GAISSVLNDILSRLDKV

SEQ ID NO: 99337 - protein, 17 aa, Severe acute respiratory syndrome coronavirus 2
AISSVLNDILSRLDKVE

SEQ ID NO: 99338 - protein, 17 aa, Severe acute respiratory syndrome coronavirus 2
ISSVLNDILSRLDKVEA

SEQ ID NO: 99339 - protein, 17 aa, Severe acute respiratory syndrome coronavirus 2
SSVLNDILSRLDKVEAE

SEQ ID NO: 99340 - protein, 17 aa, Severe acute respiratory syndrome coronavirus 2
SVLNDILSRLDKVEAEV

SEQ ID NO: 99341 - protein, 17 aa, Severe acute respiratory syndrome coronavirus 2
VLNDILSRLDKVEAEVQ

SEQ ID NO: 99342 - protein, 17 aa, Severe acute respiratory syndrome coronavirus 2
LNDILSRLDKVEAEVQI

SEQ ID NO: 99343 - protein, 17 aa, Severe acute respiratory syndrome coronavirus 2
NDILSRLDKVEAEVQID

SEQ ID NO: 99344 - protein, 17 aa, Severe acute respiratory syndrome coronavirus 2
DILSRLDKVEAEVQIDR

SEQ ID NO: 99345 - protein, 17 aa, Severe acute respiratory syndrome coronavirus 2
ILSRLDKVEAEVQIDRL

SEQ ID NO: 99346 - protein, 17 aa, Severe acute respiratory syndrome coronavirus 2
LSRLDKVEAEVQIDRLI

SEQ ID NO: 99347 - protein, 17 aa, Severe acute respiratory syndrome coronavirus 2
SRLDKVEAEVQIDRLIT

SEQ ID NO: 99348 - protein, 17 aa, Severe acute respiratory syndrome coronavirus 2
RLDKVEAEVQIDRLITG

SEQ ID NO: 99349 - protein, 17 aa, Severe acute respiratory syndrome coronavirus 2
LDKVEAEVQIDRLITGR

SEQ ID NO: 99350 - protein, 17 aa, Severe acute respiratory syndrome coronavirus 2
DKVEAEVQIDRLITGRL

SEQ ID NO: 99351 - protein, 17 aa, Severe acute respiratory syndrome coronavirus 2
KVEAEVQIDRLITGRLQ

SEQ ID NO: 99352 - protein, 17 aa, Severe acute respiratory syndrome coronavirus 2
VEAEVQIDRLITGRLQS

SEQ ID NO: 99353 - protein, 17 aa, Severe acute respiratory syndrome coronavirus 2
EAEVQIDRLITGRLQSL

SEQ ID NO: 99354 - protein, 17 aa, Severe acute respiratory syndrome coronavirus 2
AEVQIDRLITGRLQSLQ

SEQ ID NO: 99355 - protein, 17 aa, Severe acute respiratory syndrome coronavirus 2
EVQIDRLITGRLQSLQT

SEQ ID NO: 99356 - protein, 17 aa, Severe acute respiratory syndrome coronavirus 2
VQIDRLITGRLQSLQTY

SEQ ID NO: 99357 - protein, 17 aa, Severe acute respiratory syndrome coronavirus 2
QIDRLITGRLQSLQTYV

SEQ ID NO: 99358 - protein, 17 aa, Severe acute respiratory syndrome coronavirus 2
IDRLITGRLQSLQTYVT

SEQ ID NO: 99359 - protein, 17 aa, Severe acute respiratory syndrome coronavirus 2
DRLITGRLQSLQTYVTQ

SEQ ID NO: 99360 - protein, 17 aa, Severe acute respiratory syndrome coronavirus 2
RLITGRLQSLQTYVTQQ

SEQ ID NO: 99361 - protein, 17 aa, Severe acute respiratory syndrome coronavirus 2
LITGRLQSLQTYVTQQL

SEQ ID NO: 99362 - protein, 17 aa, Severe acute respiratory syndrome coronavirus 2
ITGRLQSLQTYVTQQLI

SEQ ID NO: 99363 - protein, 17 aa, Severe acute respiratory syndrome coronavirus 2
TGRLQSLQTYVTQQLIR

SEQ ID NO: 99364 - protein, 17 aa, Severe acute respiratory syndrome coronavirus 2
GRLQSLQTYVTQQLIRA

SEQ ID NO: 99365 - protein, 17 aa, Severe acute respiratory syndrome coronavirus 2
RLQSLQTYVTQQLIRAA

SEQ ID NO: 99366 - protein, 17 aa, Severe acute respiratory syndrome coronavirus 2
LQSLQTYVTQQLIRAAE

SEQ ID NO: 99367 - protein, 17 aa, Severe acute respiratory syndrome coronavirus 2
QSLQTYVTQQLIRAAEI

SEQ ID NO: 99368 - protein, 17 aa, Severe acute respiratory syndrome coronavirus 2
SLQTYVTQQLIRAAEIR

SEQ ID NO: 99369 - protein, 17 aa, Severe acute respiratory syndrome coronavirus 2
KMSECVLGQSKRVDFCG

SEQ ID NO: 99370 - protein, 17 aa, Severe acute respiratory syndrome coronavirus 2
MSECVLGQSKRVDFCGK

SEQ ID NO: 99371 - protein, 17 aa, Severe acute respiratory syndrome coronavirus 2
SECVLGQSKRVDFCGKG

SEQ ID NO: 99372 - protein, 17 aa, Severe acute respiratory syndrome coronavirus 2
QSKRVDFCGKGYHLMSF

SEQ ID NO: 99373 - protein, 17 aa, Severe acute respiratory syndrome coronavirus 2
SKRVDFCGKGYHLMSFP

SEQ ID NO: 99374 - protein, 17 aa, Severe acute respiratory syndrome coronavirus 2
KRVDFCGKGYHLMSFPQ

SEQ ID NO: 99375 - protein, 17 aa, Severe acute respiratory syndrome coronavirus 2
RVDFCGKGYHLMSFPQS

SEQ ID NO: 99376 - protein, 17 aa, Severe acute respiratory syndrome coronavirus 2
VDFCGKGYHLMSFPQSA

SEQ ID NO: 99377 - protein, 17 aa, Severe acute respiratory syndrome coronavirus 2
DFCGKGYHLMSFPQSAP

SEQ ID NO: 99378 - protein, 17 aa, Severe acute respiratory syndrome coronavirus 2
FCGKGYHLMSFPQSAPH

SEQ ID NO: 99379 - protein, 17 aa, Severe acute respiratory syndrome coronavirus 2
CGKGYHLMSFPQSAPHG

SEQ ID NO: 99380 - protein, 17 aa, Severe acute respiratory syndrome coronavirus 2
GKGYHLMSFPQSAPHGV

SEQ ID NO: 99381 - protein, 17 aa, Severe acute respiratory syndrome coronavirus 2
KGYHLMSFPQSAPHGVV

SEQ ID NO: 99382 - protein, 17 aa, Severe acute respiratory syndrome coronavirus 2
GYHLMSFPQSAPHGVVF

SEQ ID NO: 99383 - protein, 17 aa, Severe acute respiratory syndrome coronavirus 2
YHLMSFPQSAPHGVVFL

SEQ ID NO: 99384 - protein, 17 aa, Severe acute respiratory syndrome coronavirus 2
HLMSFPQSAPHGVVFLH

SEQ ID NO: 99385 - protein, 17 aa, Severe acute respiratory syndrome coronavirus 2
LMSFPQSAPHGVVFLHV

SEQ ID NO: 99386 - protein, 17 aa, Severe acute respiratory syndrome coronavirus 2
MSFPQSAPHGVVFLHVT

SEQ ID NO: 99387 - protein, 17 aa, Severe acute respiratory syndrome coronavirus 2
SFPQSAPHGVVFLHVTY

SEQ ID NO: 99388 - protein, 17 aa, Severe acute respiratory syndrome coronavirus 2
FPQSAPHGVVFLHVTYV

SEQ ID NO: 99389 - protein, 17 aa, Severe acute respiratory syndrome coronavirus 2
PQSAPHGVVFLHVTYVP

SEQ ID NO: 99390 - protein, 17 aa, Severe acute respiratory syndrome coronavirus 2
QSAPHGVVFLHVTYVPA

SEQ ID NO: 99391 - protein, 17 aa, Severe acute respiratory syndrome coronavirus 2
SAPHGVVFLHVTYVPAQ

SEQ ID NO: 99392 - protein, 17 aa, Severe acute respiratory syndrome coronavirus 2
APHGVVFLHVTYVPAQE

SEQ ID NO: 99393 - protein, 17 aa, Severe acute respiratory syndrome coronavirus 2
PHGVVFLHVTYVPAQEK

SEQ ID NO: 99394 - protein, 17 aa, Severe acute respiratory syndrome coronavirus 2
WFVTQRNFYEPQIITTD

SEQ ID NO: 99395 - protein, 17 aa, Severe acute respiratory syndrome coronavirus 2
FVTQRNFYEPQIITTDN

SEQ ID NO: 99396 - protein, 17 aa, Severe acute respiratory syndrome coronavirus 2
VTQRNFYEPQIITTDNT

SEQ ID NO: 99397 - protein, 17 aa, Severe acute respiratory syndrome coronavirus 2
TQRNFYEPQIITTDNTF

SEQ ID NO: 99398 - protein, 17 aa, Severe acute respiratory syndrome coronavirus 2
VNIQKEIDRLNEVAKNL

SEQ ID NO: 99399 - protein, 18 aa, Severe acute respiratory syndrome coronavirus 2
NIIRGWIFGTTLDSKTQS

SEQ ID NO: 99400 - protein, 18 aa, Severe acute respiratory syndrome coronavirus 2
IIRGWIFGTTLDSKTQSL

SEQ ID NO: 99401 - protein, 18 aa, Severe acute respiratory syndrome coronavirus 2
IRGWIFGTTLDSKTQSLL

SEQ ID NO: 99402 - protein, 18 aa, Severe acute respiratory syndrome coronavirus 2
RGWIFGTTLDSKTQSLLI

SEQ ID NO: 99403 - protein, 18 aa, Severe acute respiratory syndrome coronavirus 2
KNLREFVFKNIDGYFKIY

SEQ ID NO: 99404 - protein, 18 aa, Severe acute respiratory syndrome coronavirus 2
NLREFVFKNIDGYFKIYS

SEQ ID NO: 99405 - protein, 18 aa, Severe acute respiratory syndrome coronavirus 2
LREFVFKNIDGYFKIYSK

SEQ ID NO: 99406 - protein, 18 aa, Severe acute respiratory syndrome coronavirus 2
REFVFKNIDGYFKIYSKH

SEQ ID NO: 99407 - protein, 18 aa, Severe acute respiratory syndrome coronavirus 2
EFVFKNIDGYFKIYSKHT

SEQ ID NO: 99408 - protein, 18 aa, Severe acute respiratory syndrome coronavirus 2
FVFKNIDGYFKIYSKHTP

SEQ ID NO: 99409 - protein, 18 aa, Severe acute respiratory syndrome coronavirus 2
VFKNIDGYFKIYSKHTPI

SEQ ID NO: 99410 - protein, 18 aa, Severe acute respiratory syndrome coronavirus 2
FKNIDGYFKIYSKHTPIN

SEQ ID NO: 99411 - protein, 18 aa, Severe acute respiratory syndrome coronavirus 2
KNIDGYFKIYSKHTPINL

SEQ ID NO: 99412 - protein, 18 aa, Severe acute respiratory syndrome coronavirus 2
NIDGYFKIYSKHTPINLV

SEQ ID NO: 99413 - protein, 18 aa, Severe acute respiratory syndrome coronavirus 2
IDGYFKIYSKHTPINLVR

SEQ ID NO: 99414 - protein, 18 aa, Severe acute respiratory syndrome coronavirus 2
LPQGFSALEPLVDLPIGI

SEQ ID NO: 99415 - protein, 18 aa, Severe acute respiratory syndrome coronavirus 2
GIYQTSNFRVQPTESIVR

SEQ ID NO: 99416 - protein, 18 aa, Severe acute respiratory syndrome coronavirus 2
IYQTSNFRVQPTESIVRF

SEQ ID NO: 99417 - protein, 18 aa, Severe acute respiratory syndrome coronavirus 2
TRFASVYAWNRKRISNCV

SEQ ID NO: 99418 - protein, 18 aa, Severe acute respiratory syndrome coronavirus 2
RFASVYAWNRKRISNCVA

SEQ ID NO: 99419 - protein, 18 aa, Severe acute respiratory syndrome coronavirus 2
FASVYAWNRKRISNCVAD

SEQ ID NO: 99420 - protein, 18 aa, Severe acute respiratory syndrome coronavirus 2
ASVYAWNRKRISNCVADY

SEQ ID NO: 99421 - protein, 18 aa, Severe acute respiratory syndrome coronavirus 2
SVYAWNRKRISNCVADYS

SEQ ID NO: 99422 - protein, 18 aa, Severe acute respiratory syndrome coronavirus 2
KLNDLCFTNVYADSFVIR

SEQ ID NO: 99423 - protein, 18 aa, Severe acute respiratory syndrome coronavirus 2
LNDLCFTNVYADSFVIRG

SEQ ID NO: 99424 - protein, 18 aa, Severe acute respiratory syndrome coronavirus 2
NDLCFTNVYADSFVIRGD

SEQ ID NO: 99425 - protein, 18 aa, Severe acute respiratory syndrome coronavirus 2
DLCFTNVYADSFVIRGDE

SEQ ID NO: 99426 - protein, 18 aa, Severe acute respiratory syndrome coronavirus 2
LCFTNVYADSFVIRGDEV

SEQ ID NO: 99427 - protein, 18 aa, Severe acute respiratory syndrome coronavirus 2
CFTNVYADSFVIRGDEVR

SEQ ID NO: 99428 - protein, 18 aa, Severe acute respiratory syndrome coronavirus 2
FTNVYADSFVIRGDEVRQ

SEQ ID NO: 99429 - protein, 18 aa, Severe acute respiratory syndrome coronavirus 2
TNVYADSFVIRGDEVRQI

SEQ ID NO: 99430 - protein, 18 aa, Severe acute respiratory syndrome coronavirus 2
NVYADSFVIRGDEVRQIA

SEQ ID NO: 99431 - protein, 18 aa, Severe acute respiratory syndrome coronavirus 2
VYADSFVIRGDEVRQIAP

SEQ ID NO: 99432 - protein, 18 aa, Severe acute respiratory syndrome coronavirus 2
YADSFVIRGDEVRQIAPG

SEQ ID NO: 99433 - protein, 18 aa, Severe acute respiratory syndrome coronavirus 2
GDEVRQIAPGQTGKIADY

SEQ ID NO: 99434 - protein, 18 aa, Severe acute respiratory syndrome coronavirus 2
DEVRQIAPGQTGKIADYN

SEQ ID NO: 99435 - protein, 18 aa, Severe acute respiratory syndrome coronavirus 2
EVRQIAPGQTGKIADYNY

SEQ ID NO: 99436 - protein, 18 aa, Severe acute respiratory syndrome coronavirus 2
VRQIAPGQTGKIADYNYK

SEQ ID NO: 99437 - protein, 18 aa, Severe acute respiratory syndrome coronavirus 2
YKLPDDFTGCVIAWNSNN

SEQ ID NO: 99438 - protein, 18 aa, Severe acute respiratory syndrome coronavirus 2
KLPDDFTGCVIAWNSNNL

SEQ ID NO: 99439 - protein, 18 aa, Severe acute respiratory syndrome coronavirus 2
LPDDFTGCVIAWNSNNLD

SEQ ID NO: 99440 - protein, 18 aa, Severe acute respiratory syndrome coronavirus 2
PDDFTGCVIAWNSNNLDS

SEQ ID NO: 99441 - protein, 18 aa, Severe acute respiratory syndrome coronavirus 2
DDFTGCVIAWNSNNLDSK

SEQ ID NO: 99442 - protein, 18 aa, Severe acute respiratory syndrome coronavirus 2
DFTGCVIAWNSNNLDSKV

SEQ ID NO: 99443 - protein, 18 aa, Severe acute respiratory syndrome coronavirus 2
FTGCVIAWNSNNLDSKVG

SEQ ID NO: 99444 - protein, 18 aa, Severe acute respiratory syndrome coronavirus 2
TGCVIAWNSNNLDSKVGG

SEQ ID NO: 99445 - protein, 18 aa, Severe acute respiratory syndrome coronavirus 2
GCVIAWNSNNLDSKVGGN

SEQ ID NO: 99446 - protein, 18 aa, Severe acute respiratory syndrome coronavirus 2
CVIAWNSNNLDSKVGGNY

SEQ ID NO: 99447 - protein, 18 aa, Severe acute respiratory syndrome coronavirus 2
VIAWNSNNLDSKVGGNYN

SEQ ID NO: 99448 - protein, 18 aa, Severe acute respiratory syndrome coronavirus 2
NLDSKVGGNYNYLYRLFR

SEQ ID NO: 99449 - protein, 18 aa, Severe acute respiratory syndrome coronavirus 2
LDSKVGGNYNYLYRLFRK

SEQ ID NO: 99450 - protein, 18 aa, Severe acute respiratory syndrome coronavirus 2
DSKVGGNYNYLYRLFRKS

SEQ ID NO: 99451 - protein, 18 aa, Severe acute respiratory syndrome coronavirus 2
SKVGGNYNYLYRLFRKSN

SEQ ID NO: 99452 - protein, 18 aa, Severe acute respiratory syndrome coronavirus 2
KVGGNYNYLYRLFRKSNL

SEQ ID NO: 99453 - protein, 18 aa, Severe acute respiratory syndrome coronavirus 2
VGGNYNYLYRLFRKSNLK

SEQ ID NO: 99454 - protein, 18 aa, Severe acute respiratory syndrome coronavirus 2
GGNYNYLYRLFRKSNLKP

SEQ ID NO: 99455 - protein, 18 aa, Severe acute respiratory syndrome coronavirus 2
GNYNYLYRLFRKSNLKPF

SEQ ID NO: 99456 - protein, 18 aa, Severe acute respiratory syndrome coronavirus 2
NYNYLYRLFRKSNLKPFE

SEQ ID NO: 99457 - protein, 18 aa, Severe acute respiratory syndrome coronavirus 2
YNYLYRLFRKSNLKPFER

SEQ ID NO: 99458 - protein, 18 aa, Severe acute respiratory syndrome coronavirus 2
NYLYRLFRKSNLKPFERD

SEQ ID NO: 99459 - protein, 18 aa, Severe acute respiratory syndrome coronavirus 2
GFQPTNGVGYQPYRVVVL

SEQ ID NO: 99460 - protein, 18 aa, Severe acute respiratory syndrome coronavirus 2
FQPTNGVGYQPYRVVVLS

SEQ ID NO: 99461 - protein, 18 aa, Severe acute respiratory syndrome coronavirus 2
QPTNGVGYQPYRVVVLSF

SEQ ID NO: 99462 - protein, 18 aa, Severe acute respiratory syndrome coronavirus 2
PTNGVGYQPYRVVVLSFE

SEQ ID NO: 99463 - protein, 18 aa, Severe acute respiratory syndrome coronavirus 2
TNGVGYQPYRVVVLSFEL

SEQ ID NO: 99464 - protein, 18 aa, Severe acute respiratory syndrome coronavirus 2
NGVGYQPYRVVVLSFELL

SEQ ID NO: 99465 - protein, 18 aa, Severe acute respiratory syndrome coronavirus 2
GVGYQPYRVVVLSFELLH

SEQ ID NO: 99466 - protein, 18 aa, Severe acute respiratory syndrome coronavirus 2
CGPKKSTNLVKNKCVNFN

SEQ ID NO: 99467 - protein, 18 aa, Severe acute respiratory syndrome coronavirus 2
GPKKSTNLVKNKCVNFNF

SEQ ID NO: 99468 - protein, 18 aa, Severe acute respiratory syndrome coronavirus 2
PKKSTNLVKNKCVNFNFN

SEQ ID NO: 99469 - protein, 18 aa, Severe acute respiratory syndrome coronavirus 2
KKSTNLVKNKCVNFNFNG

SEQ ID NO: 99470 - protein, 18 aa, Severe acute respiratory syndrome coronavirus 2
KSTNLVKNKCVNFNFNGL

SEQ ID NO: 99471 - protein, 18 aa, Severe acute respiratory syndrome coronavirus 2
STNLVKNKCVNFNFNGLT

SEQ ID NO: 99472 - protein, 18 aa, Severe acute respiratory syndrome coronavirus 2
TNLVKNKCVNFNFNGLTG

SEQ ID NO: 99473 - protein, 18 aa, Severe acute respiratory syndrome coronavirus 2
NLVKNKCVNFNFNGLTGT

SEQ ID NO: 99474 - protein, 18 aa, Severe acute respiratory syndrome coronavirus 2
LVKNKCVNFNFNGLTGTG

SEQ ID NO: 99475 - protein, 18 aa, Severe acute respiratory syndrome coronavirus 2
VKNKCVNFNFNGLTGTGV

SEQ ID NO: 99476 - protein, 18 aa, Severe acute respiratory syndrome coronavirus 2
KNKCVNFNFNGLTGTGVL

SEQ ID NO: 99477 - protein, 18 aa, Severe acute respiratory syndrome coronavirus 2
NKCVNFNFNGLTGTGVLT

SEQ ID NO: 99478 - protein, 18 aa, Severe acute respiratory syndrome coronavirus 2
KCVNFNFNGLTGTGVLTE

SEQ ID NO: 99479 - protein, 18 aa, Severe acute respiratory syndrome coronavirus 2
CVNFNFNGLTGTGVLTES

SEQ ID NO: 99480 - protein, 18 aa, Severe acute respiratory syndrome coronavirus 2
VNFNFNGLTGTGVLTESN

SEQ ID NO: 99481 - protein, 18 aa, Severe acute respiratory syndrome coronavirus 2
NFNFNGLTGTGVLTESNK

SEQ ID NO: 99482 - protein, 18 aa, Severe acute respiratory syndrome coronavirus 2
GTGVLTESNKKFLPFQQF

SEQ ID NO: 99483 - protein, 18 aa, Severe acute respiratory syndrome coronavirus 2
TGVLTESNKKFLPFQQFG

SEQ ID NO: 99484 - protein, 18 aa, Severe acute respiratory syndrome coronavirus 2
GVLTESNKKFLPFQQFGR

SEQ ID NO: 99485 - protein, 18 aa, Severe acute respiratory syndrome coronavirus 2
VRDPQTLEILDITPCSFG

SEQ ID NO: 99486 - protein, 18 aa, Severe acute respiratory syndrome coronavirus 2
RDPQTLEILDITPCSFGG

SEQ ID NO: 99487 - protein, 18 aa, Severe acute respiratory syndrome coronavirus 2
DPQTLEILDITPCSFGGV

SEQ ID NO: 99488 - protein, 18 aa, Severe acute respiratory syndrome coronavirus 2
PQTLEILDITPCSFGGVS

SEQ ID NO: 99489 - protein, 18 aa, Severe acute respiratory syndrome coronavirus 2
QTLEILDITPCSFGGVSV

SEQ ID NO: 99490 - protein, 18 aa, Severe acute respiratory syndrome coronavirus 2
LEILDITPCSFGGVSVIT

SEQ ID NO: 99491 - protein, 18 aa, Severe acute respiratory syndrome coronavirus 2
EILDITPCSFGGVSVITP

SEQ ID NO: 99492 - protein, 18 aa, Severe acute respiratory syndrome coronavirus 2
ILDITPCSFGGVSVITPG

SEQ ID NO: 99493 - protein, 18 aa, Severe acute respiratory syndrome coronavirus 2
LDITPCSFGGVSVITPGT

SEQ ID NO: 99494 - protein, 18 aa, Severe acute respiratory syndrome coronavirus 2
QLTPTWRVYSTGSNVFQT

SEQ ID NO: 99495 - protein, 18 aa, Severe acute respiratory syndrome coronavirus 2
LTPTWRVYSTGSNVFQTR

SEQ ID NO: 99496 - protein, 18 aa, Severe acute respiratory syndrome coronavirus 2
TPTWRVYSTGSNVFQTRA

SEQ ID NO: 99497 - protein, 18 aa, Severe acute respiratory syndrome coronavirus 2
PTWRVYSTGSNVFQTRAG

SEQ ID NO: 99498 - protein, 18 aa, Severe acute respiratory syndrome coronavirus 2
TWRVYSTGSNVFQTRAGC

SEQ ID NO: 99499 - protein, 18 aa, Severe acute respiratory syndrome coronavirus 2
WRVYSTGSNVFQTRAGCL

SEQ ID NO: 99500 - protein, 18 aa, Severe acute respiratory syndrome coronavirus 2
RVYSTGSNVFQTRAGCLI

SEQ ID NO: 99501 - protein, 18 aa, Severe acute respiratory syndrome coronavirus 2
VYSTGSNVFQTRAGCLIG

SEQ ID NO: 99502 - protein, 18 aa, Severe acute respiratory syndrome coronavirus 2
YSTGSNVFQTRAGCLIGA

SEQ ID NO: 99503 - protein, 18 aa, Severe acute respiratory syndrome coronavirus 2
GDSTECSNLLLQYGSFCT

SEQ ID NO: 99504 - protein, 18 aa, Severe acute respiratory syndrome coronavirus 2
DSTECSNLLLQYGSFCTQ

SEQ ID NO: 99505 - protein, 18 aa, Severe acute respiratory syndrome coronavirus 2
STECSNLLLQYGSFCTQL

SEQ ID NO: 99506 - protein, 18 aa, Severe acute respiratory syndrome coronavirus 2
TECSNLLLQYGSFCTQLN

SEQ ID NO: 99507 - protein, 18 aa, Severe acute respiratory syndrome coronavirus 2
VLPPLLTDEMIAQYTSAL

SEQ ID NO: 99508 - protein, 18 aa, Severe acute respiratory syndrome coronavirus 2
LPPLLTDEMIAQYTSALL

SEQ ID NO: 99509 - protein, 18 aa, Severe acute respiratory syndrome coronavirus 2
GWTFGAGAALQIPFAMQM

SEQ ID NO: 99510 - protein, 18 aa, Severe acute respiratory syndrome coronavirus 2
WTFGAGAALQIPFAMQMA

SEQ ID NO: 99511 - protein, 18 aa, Severe acute respiratory syndrome coronavirus 2
TFGAGAALQIPFAMQMAY

SEQ ID NO: 99512 - protein, 18 aa, Severe acute respiratory syndrome coronavirus 2
FGAGAALQIPFAMQMAYR

SEQ ID NO: 99513 - protein, 18 aa, Severe acute respiratory syndrome coronavirus 2
GAGAALQIPFAMQMAYRF

SEQ ID NO: 99514 - protein, 18 aa, Severe acute respiratory syndrome coronavirus 2
AGAALQIPFAMQMAYRFN

SEQ ID NO: 99515 - protein, 18 aa, Severe acute respiratory syndrome coronavirus 2
GAALQIPFAMQMAYRFNG

SEQ ID NO: 99516 - protein, 18 aa, Severe acute respiratory syndrome coronavirus 2
AALQIPFAMQMAYRFNGI

SEQ ID NO: 99517 - protein, 18 aa, Severe acute respiratory syndrome coronavirus 2
ALQIPFAMQMAYRFNGIG

SEQ ID NO: 99518 - protein, 18 aa, Severe acute respiratory syndrome coronavirus 2
LQIPFAMQMAYRFNGIGV

SEQ ID NO: 99519 - protein, 18 aa, Severe acute respiratory syndrome coronavirus 2
QIPFAMQMAYRFNGIGVT

SEQ ID NO: 99520 - protein, 18 aa, Severe acute respiratory syndrome coronavirus 2
IPFAMQMAYRFNGIGVTQ

SEQ ID NO: 99521 - protein, 18 aa, Severe acute respiratory syndrome coronavirus 2
PFAMQMAYRFNGIGVTQN

SEQ ID NO: 99522 - protein, 18 aa, Severe acute respiratory syndrome coronavirus 2
FAMQMAYRFNGIGVTQNV

SEQ ID NO: 99523 - protein, 18 aa, Severe acute respiratory syndrome coronavirus 2
AMQMAYRFNGIGVTQNVL

SEQ ID NO: 99524 - protein, 18 aa, Severe acute respiratory syndrome coronavirus 2
MQMAYRFNGIGVTQNVLY

SEQ ID NO: 99525 - protein, 18 aa, Severe acute respiratory syndrome coronavirus 2
QMAYRFNGIGVTQNVLYE

SEQ ID NO: 99526 - protein, 18 aa, Severe acute respiratory syndrome coronavirus 2
MAYRFNGIGVTQNVLYEN

SEQ ID NO: 99527 - protein, 18 aa, Severe acute respiratory syndrome coronavirus 2
AYRFNGIGVTQNVLYENQ

SEQ ID NO: 99528 - protein, 18 aa, Severe acute respiratory syndrome coronavirus 2
YRFNGIGVTQNVLYENQK

SEQ ID NO: 99529 - protein, 18 aa, Severe acute respiratory syndrome coronavirus 2
RFNGIGVTQNVLYENQKL

SEQ ID NO: 99530 - protein, 18 aa, Severe acute respiratory syndrome coronavirus 2
FNGIGVTQNVLYENQKLI

SEQ ID NO: 99531 - protein, 18 aa, Severe acute respiratory syndrome coronavirus 2
NGIGVTQNVLYENQKLIA

SEQ ID NO: 99532 - protein, 18 aa, Severe acute respiratory syndrome coronavirus 2
GIGVTQNVLYENQKLIAN

SEQ ID NO: 99533 - protein, 18 aa, Severe acute respiratory syndrome coronavirus 2
IGVTQNVLYENQKLIANQ

SEQ ID NO: 99534 - protein, 18 aa, Severe acute respiratory syndrome coronavirus 2
GVTQNVLYENQKLIANQF

SEQ ID NO: 99535 - protein, 18 aa, Severe acute respiratory syndrome coronavirus 2
VTQNVLYENQKLIANQFN

SEQ ID NO: 99536 - protein, 18 aa, Severe acute respiratory syndrome coronavirus 2
LVKQLSSNFGAISSVLND

SEQ ID NO: 99537 - protein, 18 aa, Severe acute respiratory syndrome coronavirus 2
VKQLSSNFGAISSVLNDI

SEQ ID NO: 99538 - protein, 18 aa, Severe acute respiratory syndrome coronavirus 2
KQLSSNFGAISSVLNDIL

SEQ ID NO: 99539 - protein, 18 aa, Severe acute respiratory syndrome coronavirus 2
QLSSNFGAISSVLNDILS

SEQ ID NO: 99540 - protein, 18 aa, Severe acute respiratory syndrome coronavirus 2
LSSNFGAISSVLNDILSR

SEQ ID NO: 99541 - protein, 18 aa, Severe acute respiratory syndrome coronavirus 2
SSNFGAISSVLNDILSRL

SEQ ID NO: 99542 - protein, 18 aa, Severe acute respiratory syndrome coronavirus 2
SNFGAISSVLNDILSRLD

SEQ ID NO: 99543 - protein, 18 aa, Severe acute respiratory syndrome coronavirus 2
NFGAISSVLNDILSRLDK

SEQ ID NO: 99544 - protein, 18 aa, Severe acute respiratory syndrome coronavirus 2
FGAISSVLNDILSRLDKV

SEQ ID NO: 99545 - protein, 18 aa, Severe acute respiratory syndrome coronavirus 2
GAISSVLNDILSRLDKVE

SEQ ID NO: 99546 - protein, 18 aa, Severe acute respiratory syndrome coronavirus 2
AISSVLNDILSRLDKVEA

SEQ ID NO: 99547 - protein, 18 aa, Severe acute respiratory syndrome coronavirus 2
ISSVLNDILSRLDKVEAE

SEQ ID NO: 99548 - protein, 18 aa, Severe acute respiratory syndrome coronavirus 2
SSVLNDILSRLDKVEAEV

SEQ ID NO: 99549 - protein, 18 aa, Severe acute respiratory syndrome coronavirus 2
SVLNDILSRLDKVEAEVQ

SEQ ID NO: 99550 - protein, 18 aa, Severe acute respiratory syndrome coronavirus 2
VLNDILSRLDKVEAEVQI

SEQ ID NO: 99551 - protein, 18 aa, Severe acute respiratory syndrome coronavirus 2
LDKVEAEVQIDRLITGRL

SEQ ID NO: 99552 - protein, 18 aa, Severe acute respiratory syndrome coronavirus 2
DKVEAEVQIDRLITGRLQ

SEQ ID NO: 99553 - protein, 18 aa, Severe acute respiratory syndrome coronavirus 2
KVEAEVQIDRLITGRLQS

SEQ ID NO: 99554 - protein, 18 aa, Severe acute respiratory syndrome coronavirus 2
VEAEVQIDRLITGRLQSL

SEQ ID NO: 99555 - protein, 18 aa, Severe acute respiratory syndrome coronavirus 2
EAEVQIDRLITGRLQSLQ

SEQ ID NO: 99556 - protein, 18 aa, Severe acute respiratory syndrome coronavirus 2
AEVQIDRLITGRLQSLQT

SEQ ID NO: 99557 - protein, 18 aa, Severe acute respiratory syndrome coronavirus 2
EVQIDRLITGRLQSLQTY

SEQ ID NO: 99558 - protein, 18 aa, Severe acute respiratory syndrome coronavirus 2
VQIDRLITGRLQSLQTYV

SEQ ID NO: 99559 - protein, 18 aa, Severe acute respiratory syndrome coronavirus 2
QIDRLITGRLQSLQTYVT

SEQ ID NO: 99560 - protein, 18 aa, Severe acute respiratory syndrome coronavirus 2
IDRLITGRLQSLQTYVTQ

SEQ ID NO: 99561 - protein, 18 aa, Severe acute respiratory syndrome coronavirus 2
DRLITGRLQSLQTYVTQQ

SEQ ID NO: 99562 - protein, 18 aa, Severe acute respiratory syndrome coronavirus 2
RLITGRLQSLQTYVTQQL

SEQ ID NO: 99563 - protein, 18 aa, Severe acute respiratory syndrome coronavirus 2
LITGRLQSLQTYVTQQLI

SEQ ID NO: 99564 - protein, 18 aa, Severe acute respiratory syndrome coronavirus 2
ITGRLQSLQTYVTQQLIR

SEQ ID NO: 99565 - protein, 18 aa, Severe acute respiratory syndrome coronavirus 2
TGRLQSLQTYVTQQLIRA

SEQ ID NO: 99566 - protein, 18 aa, Severe acute respiratory syndrome coronavirus 2
GRLQSLQTYVTQQLIRAA

SEQ ID NO: 99567 - protein, 18 aa, Severe acute respiratory syndrome coronavirus 2
RLQSLQTYVTQQLIRAAE

SEQ ID NO: 99568 - protein, 18 aa, Severe acute respiratory syndrome coronavirus 2
LQSLQTYVTQQLIRAAEI

SEQ ID NO: 99569 - protein, 18 aa, Severe acute respiratory syndrome coronavirus 2
QSLQTYVTQQLIRAAEIR

SEQ ID NO: 99570 - protein, 18 aa, Severe acute respiratory syndrome coronavirus 2
KRVDFCGKGYHLMSFPQS

SEQ ID NO: 99571 - protein, 18 aa, Severe acute respiratory syndrome coronavirus 2
RVDFCGKGYHLMSFPQSA

SEQ ID NO: 99572 - protein, 18 aa, Severe acute respiratory syndrome coronavirus 2
VDFCGKGYHLMSFPQSAP

SEQ ID NO: 99573 - protein, 18 aa, Severe acute respiratory syndrome coronavirus 2
DFCGKGYHLMSFPQSAPH

SEQ ID NO: 99574 - protein, 18 aa, Severe acute respiratory syndrome coronavirus 2
FCGKGYHLMSFPQSAPHG

SEQ ID NO: 99575 - protein, 18 aa, Severe acute respiratory syndrome coronavirus 2
CGKGYHLMSFPQSAPHGV

SEQ ID NO: 99576 - protein, 18 aa, Severe acute respiratory syndrome coronavirus 2
GKGYHLMSFPQSAPHGVV

SEQ ID NO: 99577 - protein, 18 aa, Severe acute respiratory syndrome coronavirus 2
KGYHLMSFPQSAPHGVVF

SEQ ID NO: 99578 - protein, 18 aa, Severe acute respiratory syndrome coronavirus 2
GYHLMSFPQSAPHGVVFL

SEQ ID NO: 99579 - protein, 18 aa, Severe acute respiratory syndrome coronavirus 2
YHLMSFPQSAPHGVVFLH

SEQ ID NO: 99580 - protein, 18 aa, Severe acute respiratory syndrome coronavirus 2
HLMSFPQSAPHGVVFLHV

SEQ ID NO: 99581 - protein, 18 aa, Severe acute respiratory syndrome coronavirus 2
LMSFPQSAPHGVVFLHVT

SEQ ID NO: 99582 - protein, 18 aa, Severe acute respiratory syndrome coronavirus 2
MSFPQSAPHGVVFLHVTY

SEQ ID NO: 99583 - protein, 18 aa, Severe acute respiratory syndrome coronavirus 2
SFPQSAPHGVVFLHVTYV

SEQ ID NO: 99584 - protein, 18 aa, Severe acute respiratory syndrome coronavirus 2
FPQSAPHGVVFLHVTYVP

SEQ ID NO: 99585 - protein, 18 aa, Severe acute respiratory syndrome coronavirus 2
PQSAPHGVVFLHVTYVPA

SEQ ID NO: 99586 - protein, 18 aa, Severe acute respiratory syndrome coronavirus 2
QSAPHGVVFLHVTYVPAQ

SEQ ID NO: 99587 - protein, 18 aa, Severe acute respiratory syndrome coronavirus 2
SAPHGVVFLHVTYVPAQE

SEQ ID NO: 99588 - protein, 18 aa, Severe acute respiratory syndrome coronavirus 2
APHGVVFLHVTYVPAQEK

SEQ ID NO: 99589 - protein, 18 aa, Severe acute respiratory syndrome coronavirus 2
WFVTQRNFYEPQIITTDN

SEQ ID NO: 99590 - protein, 18 aa, Severe acute respiratory syndrome coronavirus 2
FVTQRNFYEPQIITTDNT

SEQ ID NO: 99591 - protein, 19 aa, Severe acute respiratory syndrome coronavirus 2
NIIRGWIFGTTLDSKTQSL

SEQ ID NO: 99592 - protein, 19 aa, Severe acute respiratory syndrome coronavirus 2
IIRGWIFGTTLDSKTQSLL

SEQ ID NO: 99593 - protein, 19 aa, Severe acute respiratory syndrome coronavirus 2
IRGWIFGTTLDSKTQSLLI

SEQ ID NO: 99594 - protein, 19 aa, Severe acute respiratory syndrome coronavirus 2
KNLREFVFKNIDGYFKIYS

SEQ ID NO: 99595 - protein, 19 aa, Severe acute respiratory syndrome coronavirus 2
NLREFVFKNIDGYFKIYSK

SEQ ID NO: 99596 - protein, 19 aa, Severe acute respiratory syndrome coronavirus 2
LREFVFKNIDGYFKIYSKH

SEQ ID NO: 99597 - protein, 19 aa, Severe acute respiratory syndrome coronavirus 2
REFVFKNIDGYFKIYSKHT

SEQ ID NO: 99598 - protein, 19 aa, Severe acute respiratory syndrome coronavirus 2
EFVFKNIDGYFKIYSKHTP

SEQ ID NO: 99599 - protein, 19 aa, Severe acute respiratory syndrome coronavirus 2
FVFKNIDGYFKIYSKHTPI

SEQ ID NO: 99600 - protein, 19 aa, Severe acute respiratory syndrome coronavirus 2
VFKNIDGYFKIYSKHTPIN

SEQ ID NO: 99601 - protein, 19 aa, Severe acute respiratory syndrome coronavirus 2
FKNIDGYFKIYSKHTPINL

SEQ ID NO: 99602 - protein, 19 aa, Severe acute respiratory syndrome coronavirus 2
KNIDGYFKIYSKHTPINLV

SEQ ID NO: 99603 - protein, 19 aa, Severe acute respiratory syndrome coronavirus 2
NIDGYFKIYSKHTPINLVR

SEQ ID NO: 99604 - protein, 19 aa, Severe acute respiratory syndrome coronavirus 2
GTITDAVDCALDPLSETKC

SEQ ID NO: 99605 - protein, 19 aa, Severe acute respiratory syndrome coronavirus 2
TITDAVDCALDPLSETKCT

SEQ ID NO: 99606 - protein, 19 aa, Severe acute respiratory syndrome coronavirus 2
GIYQTSNFRVQPTESIVRF

SEQ ID NO: 99607 - protein, 19 aa, Severe acute respiratory syndrome coronavirus 2
TRFASVYAWNRKRISNCVA

SEQ ID NO: 99608 - protein, 19 aa, Severe acute respiratory syndrome coronavirus 2
RFASVYAWNRKRISNCVAD

SEQ ID NO: 99609 - protein, 19 aa, Severe acute respiratory syndrome coronavirus 2
FASVYAWNRKRISNCVADY

SEQ ID NO: 99610 - protein, 19 aa, Severe acute respiratory syndrome coronavirus 2
ASVYAWNRKRISNCVADYS

SEQ ID NO: 99611 - protein, 19 aa, Severe acute respiratory syndrome coronavirus 2
KLNDLCFTNVYADSFVIRG

SEQ ID NO: 99612 - protein, 19 aa, Severe acute respiratory syndrome coronavirus 2
LNDLCFTNVYADSFVIRGD

SEQ ID NO: 99613 - protein, 19 aa, Severe acute respiratory syndrome coronavirus 2
NDLCFTNVYADSFVIRGDE

SEQ ID NO: 99614 - protein, 19 aa, Severe acute respiratory syndrome coronavirus 2
DLCFTNVYADSFVIRGDEV

SEQ ID NO: 99615 - protein, 19 aa, Severe acute respiratory syndrome coronavirus 2
LCFTNVYADSFVIRGDEVR

SEQ ID NO: 99616 - protein, 19 aa, Severe acute respiratory syndrome coronavirus 2
CFTNVYADSFVIRGDEVRQ

SEQ ID NO: 99617 - protein, 19 aa, Severe acute respiratory syndrome coronavirus 2
FTNVYADSFVIRGDEVRQI

SEQ ID NO: 99618 - protein, 19 aa, Severe acute respiratory syndrome coronavirus 2
TNVYADSFVIRGDEVRQIA

SEQ ID NO: 99619 - protein, 19 aa, Severe acute respiratory syndrome coronavirus 2
NVYADSFVIRGDEVRQIAP

SEQ ID NO: 99620 - protein, 19 aa, Severe acute respiratory syndrome coronavirus 2
VYADSFVIRGDEVRQIAPG

SEQ ID NO: 99621 - protein, 19 aa, Severe acute respiratory syndrome coronavirus 2
RGDEVRQIAPGQTGKIADY

SEQ ID NO: 99622 - protein, 19 aa, Severe acute respiratory syndrome coronavirus 2
GDEVRQIAPGQTGKIADYN

SEQ ID NO: 99623 - protein, 19 aa, Severe acute respiratory syndrome coronavirus 2
DEVRQIAPGQTGKIADYNY

SEQ ID NO: 99624 - protein, 19 aa, Severe acute respiratory syndrome coronavirus 2
EVRQIAPGQTGKIADYNYK

SEQ ID NO: 99625 - protein, 19 aa, Severe acute respiratory syndrome coronavirus 2
VRQIAPGQTGKIADYNYKL

SEQ ID NO: 99626 - protein, 19 aa, Severe acute respiratory syndrome coronavirus 2
RQIAPGQTGKIADYNYKLP

SEQ ID NO: 99627 - protein, 19 aa, Severe acute respiratory syndrome coronavirus 2
QIAPGQTGKIADYNYKLPD

SEQ ID NO: 99628 - protein, 19 aa, Severe acute respiratory syndrome coronavirus 2
DYNYKLPDDFTGCVIAWNS

SEQ ID NO: 99629 - protein, 19 aa, Severe acute respiratory syndrome coronavirus 2
YNYKLPDDFTGCVIAWNSN

SEQ ID NO: 99630 - protein, 19 aa, Severe acute respiratory syndrome coronavirus 2
NYKLPDDFTGCVIAWNSNN

SEQ ID NO: 99631 - protein, 19 aa, Severe acute respiratory syndrome coronavirus 2
YKLPDDFTGCVIAWNSNNL

SEQ ID NO: 99632 - protein, 19 aa, Severe acute respiratory syndrome coronavirus 2
KLPDDFTGCVIAWNSNNLD

SEQ ID NO: 99633 - protein, 19 aa, Severe acute respiratory syndrome coronavirus 2
LPDDFTGCVIAWNSNNLDS

SEQ ID NO: 99634 - protein, 19 aa, Severe acute respiratory syndrome coronavirus 2
PDDFTGCVIAWNSNNLDSK

SEQ ID NO: 99635 - protein, 19 aa, Severe acute respiratory syndrome coronavirus 2
DDFTGCVIAWNSNNLDSKV

SEQ ID NO: 99636 - protein, 19 aa, Severe acute respiratory syndrome coronavirus 2
DFTGCVIAWNSNNLDSKVG

SEQ ID NO: 99637 - protein, 19 aa, Severe acute respiratory syndrome coronavirus 2
FTGCVIAWNSNNLDSKVGG

SEQ ID NO: 99638 - protein, 19 aa, Severe acute respiratory syndrome coronavirus 2
TGCVIAWNSNNLDSKVGGN

SEQ ID NO: 99639 - protein, 19 aa, Severe acute respiratory syndrome coronavirus 2
GCVIAWNSNNLDSKVGGNY

SEQ ID NO: 99640 - protein, 19 aa, Severe acute respiratory syndrome coronavirus 2
CVIAWNSNNLDSKVGGNYN

SEQ ID NO: 99641 - protein, 19 aa, Severe acute respiratory syndrome coronavirus 2
VIAWNSNNLDSKVGGNYNY

SEQ ID NO: 99642 - protein, 19 aa, Severe acute respiratory syndrome coronavirus 2
SNNLDSKVGGNYNYLYRLF

SEQ ID NO: 99643 - protein, 19 aa, Severe acute respiratory syndrome coronavirus 2
NNLDSKVGGNYNYLYRLFR

SEQ ID NO: 99644 - protein, 19 aa, Severe acute respiratory syndrome coronavirus 2
NLDSKVGGNYNYLYRLFRK

SEQ ID NO: 99645 - protein, 19 aa, Severe acute respiratory syndrome coronavirus 2
LDSKVGGNYNYLYRLFRKS

SEQ ID NO: 99646 - protein, 19 aa, Severe acute respiratory syndrome coronavirus 2
DSKVGGNYNYLYRLFRKSN

SEQ ID NO: 99647 - protein, 19 aa, Severe acute respiratory syndrome coronavirus 2
SKVGGNYNYLYRLFRKSNL

SEQ ID NO: 99648 - protein, 19 aa, Severe acute respiratory syndrome coronavirus 2
KVGGNYNYLYRLFRKSNLK

SEQ ID NO: 99649 - protein, 19 aa, Severe acute respiratory syndrome coronavirus 2
VGGNYNYLYRLFRKSNLKP

SEQ ID NO: 99650 - protein, 19 aa, Severe acute respiratory syndrome coronavirus 2
GGNYNYLYRLFRKSNLKPF

SEQ ID NO: 99651 - protein, 19 aa, Severe acute respiratory syndrome coronavirus 2
GNYNYLYRLFRKSNLKPFE

SEQ ID NO: 99652 - protein, 19 aa, Severe acute respiratory syndrome coronavirus 2
NYNYLYRLFRKSNLKPFER

SEQ ID NO: 99653 - protein, 19 aa, Severe acute respiratory syndrome coronavirus 2
YNYLYRLFRKSNLKPFERD

SEQ ID NO: 99654 - protein, 19 aa, Severe acute respiratory syndrome coronavirus 2
YGFQPTNGVGYQPYRVVVL

SEQ ID NO: 99655 - protein, 19 aa, Severe acute respiratory syndrome coronavirus 2
GFQPTNGVGYQPYRVVVLS

SEQ ID NO: 99656 - protein, 19 aa, Severe acute respiratory syndrome coronavirus 2
FQPTNGVGYQPYRVVVLSF

SEQ ID NO: 99657 - protein, 19 aa, Severe acute respiratory syndrome coronavirus 2
QPTNGVGYQPYRVVVLSFE

SEQ ID NO: 99658 - protein, 19 aa, Severe acute respiratory syndrome coronavirus 2
PTNGVGYQPYRVVVLSFEL

SEQ ID NO: 99659 - protein, 19 aa, Severe acute respiratory syndrome coronavirus 2
TNGVGYQPYRVVVLSFELL

SEQ ID NO: 99660 - protein, 19 aa, Severe acute respiratory syndrome coronavirus 2
NGVGYQPYRVVVLSFELLH

SEQ ID NO: 99661 - protein, 19 aa, Severe acute respiratory syndrome coronavirus 2
TVCGPKKSTNLVKNKCVNF

SEQ ID NO: 99662 - protein, 19 aa, Severe acute respiratory syndrome coronavirus 2
VCGPKKSTNLVKNKCVNFN

SEQ ID NO: 99663 - protein, 19 aa, Severe acute respiratory syndrome coronavirus 2
CGPKKSTNLVKNKCVNFNF

SEQ ID NO: 99664 - protein, 19 aa, Severe acute respiratory syndrome coronavirus 2
GPKKSTNLVKNKCVNFNFN

SEQ ID NO: 99665 - protein, 19 aa, Severe acute respiratory syndrome coronavirus 2
PKKSTNLVKNKCVNFNFNG

SEQ ID NO: 99666 - protein, 19 aa, Severe acute respiratory syndrome coronavirus 2
KKSTNLVKNKCVNFNFNGL

SEQ ID NO: 99667 - protein, 19 aa, Severe acute respiratory syndrome coronavirus 2
KSTNLVKNKCVNFNFNGLT

SEQ ID NO: 99668 - protein, 19 aa, Severe acute respiratory syndrome coronavirus 2
STNLVKNKCVNFNFNGLTG

SEQ ID NO: 99669 - protein, 19 aa, Severe acute respiratory syndrome coronavirus 2
TNLVKNKCVNFNFNGLTGT

SEQ ID NO: 99670 - protein, 19 aa, Severe acute respiratory syndrome coronavirus 2
NLVKNKCVNFNFNGLTGTG

SEQ ID NO: 99671 - protein, 19 aa, Severe acute respiratory syndrome coronavirus 2
LVKNKCVNFNFNGLTGTGV

SEQ ID NO: 99672 - protein, 19 aa, Severe acute respiratory syndrome coronavirus 2
VKNKCVNFNFNGLTGTGVL

SEQ ID NO: 99673 - protein, 19 aa, Severe acute respiratory syndrome coronavirus 2
KNKCVNFNFNGLTGTGVLT

SEQ ID NO: 99674 - protein, 19 aa, Severe acute respiratory syndrome coronavirus 2
NKCVNFNFNGLTGTGVLTE

SEQ ID NO: 99675 - protein, 19 aa, Severe acute respiratory syndrome coronavirus 2
KCVNFNFNGLTGTGVLTES

SEQ ID NO: 99676 - protein, 19 aa, Severe acute respiratory syndrome coronavirus 2
CVNFNFNGLTGTGVLTESN

SEQ ID NO: 99677 - protein, 19 aa, Severe acute respiratory syndrome coronavirus 2
VNFNFNGLTGTGVLTESNK

SEQ ID NO: 99678 - protein, 19 aa, Severe acute respiratory syndrome coronavirus 2
GTGVLTESNKKFLPFQQFG

SEQ ID NO: 99679 - protein, 19 aa, Severe acute respiratory syndrome coronavirus 2
TGVLTESNKKFLPFQQFGR

SEQ ID NO: 99680 - protein, 19 aa, Severe acute respiratory syndrome coronavirus 2
VRDPQTLEILDITPCSFGG

SEQ ID NO: 99681 - protein, 19 aa, Severe acute respiratory syndrome coronavirus 2
RDPQTLEILDITPCSFGGV

SEQ ID NO: 99682 - protein, 19 aa, Severe acute respiratory syndrome coronavirus 2
DPQTLEILDITPCSFGGVS

SEQ ID NO: 99683 - protein, 19 aa, Severe acute respiratory syndrome coronavirus 2
PQTLEILDITPCSFGGVSV

SEQ ID NO: 99684 - protein, 19 aa, Severe acute respiratory syndrome coronavirus 2
QTLEILDITPCSFGGVSVI

SEQ ID NO: 99685 - protein, 19 aa, Severe acute respiratory syndrome coronavirus 2
TLEILDITPCSFGGVSVIT

SEQ ID NO: 99686 - protein, 19 aa, Severe acute respiratory syndrome coronavirus 2
LEILDITPCSFGGVSVITP

SEQ ID NO: 99687 - protein, 19 aa, Severe acute respiratory syndrome coronavirus 2
EILDITPCSFGGVSVITPG

SEQ ID NO: 99688 - protein, 19 aa, Severe acute respiratory syndrome coronavirus 2
ILDITPCSFGGVSVITPGT

SEQ ID NO: 99689 - protein, 19 aa, Severe acute respiratory syndrome coronavirus 2
QLTPTWRVYSTGSNVFQTR

SEQ ID NO: 99690 - protein, 19 aa, Severe acute respiratory syndrome coronavirus 2
LTPTWRVYSTGSNVFQTRA

SEQ ID NO: 99691 - protein, 19 aa, Severe acute respiratory syndrome coronavirus 2
TPTWRVYSTGSNVFQTRAG

SEQ ID NO: 99692 - protein, 19 aa, Severe acute respiratory syndrome coronavirus 2
PTWRVYSTGSNVFQTRAGC

SEQ ID NO: 99693 - protein, 19 aa, Severe acute respiratory syndrome coronavirus 2
TWRVYSTGSNVFQTRAGCL

SEQ ID NO: 99694 - protein, 19 aa, Severe acute respiratory syndrome coronavirus 2
WRVYSTGSNVFQTRAGCLI

SEQ ID NO: 99695 - protein, 19 aa, Severe acute respiratory syndrome coronavirus 2
RVYSTGSNVFQTRAGCLIG

SEQ ID NO: 99696 - protein, 19 aa, Severe acute respiratory syndrome coronavirus 2
VYSTGSNVFQTRAGCLIGA

SEQ ID NO: 99697 - protein, 19 aa, Severe acute respiratory syndrome coronavirus 2
CGDSTECSNLLLQYGSFCT

SEQ ID NO: 99698 - protein, 19 aa, Severe acute respiratory syndrome coronavirus 2
GDSTECSNLLLQYGSFCTQ

SEQ ID NO: 99699 - protein, 19 aa, Severe acute respiratory syndrome coronavirus 2
DSTECSNLLLQYGSFCTQL

SEQ ID NO: 99700 - protein, 19 aa, Severe acute respiratory syndrome coronavirus 2
STECSNLLLQYGSFCTQLN

SEQ ID NO: 99701 - protein, 19 aa, Severe acute respiratory syndrome coronavirus 2
VLPPLLTDEMIAQYTSALL

SEQ ID NO: 99702 - protein, 19 aa, Severe acute respiratory syndrome coronavirus 2
GWTFGAGAALQIPFAMQMA

SEQ ID NO: 99703 - protein, 19 aa, Severe acute respiratory syndrome coronavirus 2
WTFGAGAALQIPFAMQMAY

SEQ ID NO: 99704 - protein, 19 aa, Severe acute respiratory syndrome coronavirus 2
TFGAGAALQIPFAMQMAYR

SEQ ID NO: 99705 - protein, 19 aa, Severe acute respiratory syndrome coronavirus 2
FGAGAALQIPFAMQMAYRF

SEQ ID NO: 99706 - protein, 19 aa, Severe acute respiratory syndrome coronavirus 2
AGAALQIPFAMQMAYRFNG

SEQ ID NO: 99707 - protein, 19 aa, Severe acute respiratory syndrome coronavirus 2
GAALQIPFAMQMAYRFNGI

SEQ ID NO: 99708 - protein, 19 aa, Severe acute respiratory syndrome coronavirus 2
AALQIPFAMQMAYRFNGIG

SEQ ID NO: 99709 - protein, 19 aa, Severe acute respiratory syndrome coronavirus 2
ALQIPFAMQMAYRFNGIGV

SEQ ID NO: 99710 - protein, 19 aa, Severe acute respiratory syndrome coronavirus 2
LQIPFAMQMAYRFNGIGVT

SEQ ID NO: 99711 - protein, 19 aa, Severe acute respiratory syndrome coronavirus 2
QIPFAMQMAYRFNGIGVTQ

SEQ ID NO: 99712 - protein, 19 aa, Severe acute respiratory syndrome coronavirus 2
IPFAMQMAYRFNGIGVTQN

SEQ ID NO: 99713 - protein, 19 aa, Severe acute respiratory syndrome coronavirus 2
PFAMQMAYRFNGIGVTQNV

SEQ ID NO: 99714 - protein, 19 aa, Severe acute respiratory syndrome coronavirus 2
FAMQMAYRFNGIGVTQNVL

SEQ ID NO: 99715 - protein, 19 aa, Severe acute respiratory syndrome coronavirus 2
AMQMAYRFNGIGVTQNVLY

SEQ ID NO: 99716 - protein, 19 aa, Severe acute respiratory syndrome coronavirus 2
MQMAYRFNGIGVTQNVLYE

SEQ ID NO: 99717 - protein, 19 aa, Severe acute respiratory syndrome coronavirus 2
QMAYRFNGIGVTQNVLYEN

SEQ ID NO: 99718 - protein, 19 aa, Severe acute respiratory syndrome coronavirus 2
AYRFNGIGVTQNVLYENQK

SEQ ID NO: 99719 - protein, 19 aa, Severe acute respiratory syndrome coronavirus 2
YRFNGIGVTQNVLYENQKL

SEQ ID NO: 99720 - protein, 19 aa, Severe acute respiratory syndrome coronavirus 2
RFNGIGVTQNVLYENQKLI

SEQ ID NO: 99721 - protein, 19 aa, Severe acute respiratory syndrome coronavirus 2
FNGIGVTQNVLYENQKLIA

SEQ ID NO: 99722 - protein, 19 aa, Severe acute respiratory syndrome coronavirus 2
NGIGVTQNVLYENQKLIAN

SEQ ID NO: 99723 - protein, 19 aa, Severe acute respiratory syndrome coronavirus 2
GIGVTQNVLYENQKLIANQ

SEQ ID NO: 99724 - protein, 19 aa, Severe acute respiratory syndrome coronavirus 2
IGVTQNVLYENQKLIANQF

SEQ ID NO: 99725 - protein, 19 aa, Severe acute respiratory syndrome coronavirus 2
GVTQNVLYENQKLIANQFN

SEQ ID NO: 99726 - protein, 19 aa, Severe acute respiratory syndrome coronavirus 2
LVKQLSSNFGAISSVLNDI

SEQ ID NO: 99727 - protein, 19 aa, Severe acute respiratory syndrome coronavirus 2
VKQLSSNFGAISSVLNDIL

SEQ ID NO: 99728 - protein, 19 aa, Severe acute respiratory syndrome coronavirus 2
KQLSSNFGAISSVLNDILS

SEQ ID NO: 99729 - protein, 19 aa, Severe acute respiratory syndrome coronavirus 2
QLSSNFGAISSVLNDILSR

SEQ ID NO: 99730 - protein, 19 aa, Severe acute respiratory syndrome coronavirus 2
LSSNFGAISSVLNDILSRL

SEQ ID NO: 99731 - protein, 19 aa, Severe acute respiratory syndrome coronavirus 2
SSNFGAISSVLNDILSRLD

SEQ ID NO: 99732 - protein, 19 aa, Severe acute respiratory syndrome coronavirus 2
SNFGAISSVLNDILSRLDK

SEQ ID NO: 99733 - protein, 19 aa, Severe acute respiratory syndrome coronavirus 2
NFGAISSVLNDILSRLDKV

SEQ ID NO: 99734 - protein, 19 aa, Severe acute respiratory syndrome coronavirus 2
FGAISSVLNDILSRLDKVE

SEQ ID NO: 99735 - protein, 19 aa, Severe acute respiratory syndrome coronavirus 2
GAISSVLNDILSRLDKVEA

SEQ ID NO: 99736 - protein, 19 aa, Severe acute respiratory syndrome coronavirus 2
AISSVLNDILSRLDKVEAE

SEQ ID NO: 99737 - protein, 19 aa, Severe acute respiratory syndrome coronavirus 2
ISSVLNDILSRLDKVEAEV

SEQ ID NO: 99738 - protein, 19 aa, Severe acute respiratory syndrome coronavirus 2
SSVLNDILSRLDKVEAEVQ

SEQ ID NO: 99739 - protein, 19 aa, Severe acute respiratory syndrome coronavirus 2
SVLNDILSRLDKVEAEVQI

SEQ ID NO: 99740 - protein, 19 aa, Severe acute respiratory syndrome coronavirus 2
VLNDILSRLDKVEAEVQID

SEQ ID NO: 99741 - protein, 19 aa, Severe acute respiratory syndrome coronavirus 2
LNDILSRLDKVEAEVQIDR

SEQ ID NO: 99742 - protein, 19 aa, Severe acute respiratory syndrome coronavirus 2
NDILSRLDKVEAEVQIDRL

SEQ ID NO: 99743 - protein, 19 aa, Severe acute respiratory syndrome coronavirus 2
DILSRLDKVEAEVQIDRLI

SEQ ID NO: 99744 - protein, 19 aa, Severe acute respiratory syndrome coronavirus 2
ILSRLDKVEAEVQIDRLIT

SEQ ID NO: 99745 - protein, 19 aa, Severe acute respiratory syndrome coronavirus 2
LSRLDKVEAEVQIDRLITG

SEQ ID NO: 99746 - protein, 19 aa, Severe acute respiratory syndrome coronavirus 2
SRLDKVEAEVQIDRLITGR

SEQ ID NO: 99747 - protein, 19 aa, Severe acute respiratory syndrome coronavirus 2
RLDKVEAEVQIDRLITGRL

SEQ ID NO: 99748 - protein, 19 aa, Severe acute respiratory syndrome coronavirus 2
LDKVEAEVQIDRLITGRLQ

SEQ ID NO: 99749 - protein, 19 aa, Severe acute respiratory syndrome coronavirus 2
DKVEAEVQIDRLITGRLQS

SEQ ID NO: 99750 - protein, 19 aa, Severe acute respiratory syndrome coronavirus 2
KVEAEVQIDRLITGRLQSL

SEQ ID NO: 99751 - protein, 19 aa, Severe acute respiratory syndrome coronavirus 2
VEAEVQIDRLITGRLQSLQ

SEQ ID NO: 99752 - protein, 19 aa, Severe acute respiratory syndrome coronavirus 2
EAEVQIDRLITGRLQSLQT

SEQ ID NO: 99753 - protein, 19 aa, Severe acute respiratory syndrome coronavirus 2
AEVQIDRLITGRLQSLQTY

SEQ ID NO: 99754 - protein, 19 aa, Severe acute respiratory syndrome coronavirus 2
EVQIDRLITGRLQSLQTYV

SEQ ID NO: 99755 - protein, 19 aa, Severe acute respiratory syndrome coronavirus 2
VQIDRLITGRLQSLQTYVT

SEQ ID NO: 99756 - protein, 19 aa, Severe acute respiratory syndrome coronavirus 2
QIDRLITGRLQSLQTYVTQ

SEQ ID NO: 99757 - protein, 19 aa, Severe acute respiratory syndrome coronavirus 2
IDRLITGRLQSLQTYVTQQ

SEQ ID NO: 99758 - protein, 19 aa, Severe acute respiratory syndrome coronavirus 2
DRLITGRLQSLQTYVTQQL

SEQ ID NO: 99759 - protein, 19 aa, Severe acute respiratory syndrome coronavirus 2
LITGRLQSLQTYVTQQLIR

SEQ ID NO: 99760 - protein, 19 aa, Severe acute respiratory syndrome coronavirus 2
ITGRLQSLQTYVTQQLIRA

SEQ ID NO: 99761 - protein, 19 aa, Severe acute respiratory syndrome coronavirus 2
TGRLQSLQTYVTQQLIRAA

SEQ ID NO: 99762 - protein, 19 aa, Severe acute respiratory syndrome coronavirus 2
GRLQSLQTYVTQQLIRAAE

SEQ ID NO: 99763 - protein, 19 aa, Severe acute respiratory syndrome coronavirus 2
RLQSLQTYVTQQLIRAAEI

SEQ ID NO: 99764 - protein, 19 aa, Severe acute respiratory syndrome coronavirus 2
LQSLQTYVTQQLIRAAEIR

SEQ ID NO: 99765 - protein, 19 aa, Severe acute respiratory syndrome coronavirus 2
KMSECVLGQSKRVDFCGKG

SEQ ID NO: 99766 - protein, 19 aa, Severe acute respiratory syndrome coronavirus 2
MSECVLGQSKRVDFCGKGY

SEQ ID NO: 99767 - protein, 19 aa, Severe acute respiratory syndrome coronavirus 2
SECVLGQSKRVDFCGKGYH

SEQ ID NO: 99768 - protein, 19 aa, Severe acute respiratory syndrome coronavirus 2
LGQSKRVDFCGKGYHLMSF

SEQ ID NO: 99769 - protein, 19 aa, Severe acute respiratory syndrome coronavirus 2
GQSKRVDFCGKGYHLMSFP

SEQ ID NO: 99770 - protein, 19 aa, Severe acute respiratory syndrome coronavirus 2
QSKRVDFCGKGYHLMSFPQ

SEQ ID NO: 99771 - protein, 19 aa, Severe acute respiratory syndrome coronavirus 2
SKRVDFCGKGYHLMSFPQS

SEQ ID NO: 99772 - protein, 19 aa, Severe acute respiratory syndrome coronavirus 2
KRVDFCGKGYHLMSFPQSA

SEQ ID NO: 99773 - protein, 19 aa, Severe acute respiratory syndrome coronavirus 2
RVDFCGKGYHLMSFPQSAP

SEQ ID NO: 99774 - protein, 19 aa, Severe acute respiratory syndrome coronavirus 2
VDFCGKGYHLMSFPQSAPH

SEQ ID NO: 99775 - protein, 19 aa, Severe acute respiratory syndrome coronavirus 2
DFCGKGYHLMSFPQSAPHG

SEQ ID NO: 99776 - protein, 19 aa, Severe acute respiratory syndrome coronavirus 2
FCGKGYHLMSFPQSAPHGV

SEQ ID NO: 99777 - protein, 19 aa, Severe acute respiratory syndrome coronavirus 2
CGKGYHLMSFPQSAPHGVV

SEQ ID NO: 99778 - protein, 19 aa, Severe acute respiratory syndrome coronavirus 2
GKGYHLMSFPQSAPHGVVF

SEQ ID NO: 99779 - protein, 19 aa, Severe acute respiratory syndrome coronavirus 2
KGYHLMSFPQSAPHGVVFL

SEQ ID NO: 99780 - protein, 19 aa, Severe acute respiratory syndrome coronavirus 2
GYHLMSFPQSAPHGVVFLH

SEQ ID NO: 99781 - protein, 19 aa, Severe acute respiratory syndrome coronavirus 2
YHLMSFPQSAPHGVVFLHV

SEQ ID NO: 99782 - protein, 19 aa, Severe acute respiratory syndrome coronavirus 2
HLMSFPQSAPHGVVFLHVT

SEQ ID NO: 99783 - protein, 19 aa, Severe acute respiratory syndrome coronavirus 2
LMSFPQSAPHGVVFLHVTY

SEQ ID NO: 99784 - protein, 19 aa, Severe acute respiratory syndrome coronavirus 2
MSFPQSAPHGVVFLHVTYV

SEQ ID NO: 99785 - protein, 19 aa, Severe acute respiratory syndrome coronavirus 2
SFPQSAPHGVVFLHVTYVP

SEQ ID NO: 99786 - protein, 19 aa, Severe acute respiratory syndrome coronavirus 2
FPQSAPHGVVFLHVTYVPA

SEQ ID NO: 99787 - protein, 19 aa, Severe acute respiratory syndrome coronavirus 2
PQSAPHGVVFLHVTYVPAQ

SEQ ID NO: 99788 - protein, 19 aa, Severe acute respiratory syndrome coronavirus 2
QSAPHGVVFLHVTYVPAQE

SEQ ID NO: 99789 - protein, 19 aa, Severe acute respiratory syndrome coronavirus 2
SAPHGVVFLHVTYVPAQEK

SEQ ID NO: 99790 - protein, 19 aa, Severe acute respiratory syndrome coronavirus 2
WFVTQRNFYEPQIITTDNT

SEQ ID NO: 99791 - protein, 19 aa, Severe acute respiratory syndrome coronavirus 2
FVTQRNFYEPQIITTDNTF

SEQ ID NO: 99792 - protein, 20 aa, Severe acute respiratory syndrome coronavirus 2
NIIRGWIFGTTLDSKTQSLL

SEQ ID NO: 99793 - protein, 20 aa, Severe acute respiratory syndrome coronavirus 2
IIRGWIFGTTLDSKTQSLLI

SEQ ID NO: 99794 - protein, 20 aa, Severe acute respiratory syndrome coronavirus 2
KNLREFVFKNIDGYFKIYSK

SEQ ID NO: 99795 - protein, 20 aa, Severe acute respiratory syndrome coronavirus 2
NLREFVFKNIDGYFKIYSKH

SEQ ID NO: 99796 - protein, 20 aa, Severe acute respiratory syndrome coronavirus 2
LREFVFKNIDGYFKIYSKHT

SEQ ID NO: 99797 - protein, 20 aa, Severe acute respiratory syndrome coronavirus 2
REFVFKNIDGYFKIYSKHTP

SEQ ID NO: 99798 - protein, 20 aa, Severe acute respiratory syndrome coronavirus 2
EFVFKNIDGYFKIYSKHTPI

SEQ ID NO: 99799 - protein, 20 aa, Severe acute respiratory syndrome coronavirus 2
FVFKNIDGYFKIYSKHTPIN

SEQ ID NO: 99800 - protein, 20 aa, Severe acute respiratory syndrome coronavirus 2
VFKNIDGYFKIYSKHTPINL

SEQ ID NO: 99801 - protein, 20 aa, Severe acute respiratory syndrome coronavirus 2
FKNIDGYFKIYSKHTPINLV

SEQ ID NO: 99802 - protein, 20 aa, Severe acute respiratory syndrome coronavirus 2
KNIDGYFKIYSKHTPINLVR

SEQ ID NO: 99803 - protein, 20 aa, Severe acute respiratory syndrome coronavirus 2
GTITDAVDCALDPLSETKCT

SEQ ID NO: 99804 - protein, 20 aa, Severe acute respiratory syndrome coronavirus 2
TITDAVDCALDPLSETKCTL

SEQ ID NO: 99805 - protein, 20 aa, Severe acute respiratory syndrome coronavirus 2
ITDAVDCALDPLSETKCTLK

SEQ ID NO: 99806 - protein, 20 aa, Severe acute respiratory syndrome coronavirus 2
TRFASVYAWNRKRISNCVAD

SEQ ID NO: 99807 - protein, 20 aa, Severe acute respiratory syndrome coronavirus 2
RFASVYAWNRKRISNCVADY

SEQ ID NO: 99808 - protein, 20 aa, Severe acute respiratory syndrome coronavirus 2
FASVYAWNRKRISNCVADYS

SEQ ID NO: 99809 - protein, 20 aa, Severe acute respiratory syndrome coronavirus 2
KLNDLCFTNVYADSFVIRGD

SEQ ID NO: 99810 - protein, 20 aa, Severe acute respiratory syndrome coronavirus 2
LNDLCFTNVYADSFVIRGDE

SEQ ID NO: 99811 - protein, 20 aa, Severe acute respiratory syndrome coronavirus 2
NDLCFTNVYADSFVIRGDEV

SEQ ID NO: 99812 - protein, 20 aa, Severe acute respiratory syndrome coronavirus 2
DLCFTNVYADSFVIRGDEVR

SEQ ID NO: 99813 - protein, 20 aa, Severe acute respiratory syndrome coronavirus 2
LCFTNVYADSFVIRGDEVRQ

SEQ ID NO: 99814 - protein, 20 aa, Severe acute respiratory syndrome coronavirus 2
CFTNVYADSFVIRGDEVRQI

SEQ ID NO: 99815 - protein, 20 aa, Severe acute respiratory syndrome coronavirus 2
FTNVYADSFVIRGDEVRQIA

SEQ ID NO: 99816 - protein, 20 aa, Severe acute respiratory syndrome coronavirus 2
TNVYADSFVIRGDEVRQIAP

SEQ ID NO: 99817 - protein, 20 aa, Severe acute respiratory syndrome coronavirus 2
NVYADSFVIRGDEVRQIAPG

SEQ ID NO: 99818 - protein, 20 aa, Severe acute respiratory syndrome coronavirus 2
RGDEVRQIAPGQTGKIADYN

SEQ ID NO: 99819 - protein, 20 aa, Severe acute respiratory syndrome coronavirus 2
GDEVRQIAPGQTGKIADYNY

SEQ ID NO: 99820 - protein, 20 aa, Severe acute respiratory syndrome coronavirus 2
DEVRQIAPGQTGKIADYNYK

SEQ ID NO: 99821 - protein, 20 aa, Severe acute respiratory syndrome coronavirus 2
EVRQIAPGQTGKIADYNYKL

SEQ ID NO: 99822 - protein, 20 aa, Severe acute respiratory syndrome coronavirus 2
VRQIAPGQTGKIADYNYKLP

SEQ ID NO: 99823 - protein, 20 aa, Severe acute respiratory syndrome coronavirus 2
RQIAPGQTGKIADYNYKLPD

SEQ ID NO: 99824 - protein, 20 aa, Severe acute respiratory syndrome coronavirus 2
QIAPGQTGKIADYNYKLPDD

SEQ ID NO: 99825 - protein, 20 aa, Severe acute respiratory syndrome coronavirus 2
IAPGQTGKIADYNYKLPDDF

SEQ ID NO: 99826 - protein, 20 aa, Severe acute respiratory syndrome coronavirus 2
IADYNYKLPDDFTGCVIAWN

SEQ ID NO: 99827 - protein, 20 aa, Severe acute respiratory syndrome coronavirus 2
ADYNYKLPDDFTGCVIAWNS

SEQ ID NO: 99828 - protein, 20 aa, Severe acute respiratory syndrome coronavirus 2
DYNYKLPDDFTGCVIAWNSN

SEQ ID NO: 99829 - protein, 20 aa, Severe acute respiratory syndrome coronavirus 2
YNYKLPDDFTGCVIAWNSNN

SEQ ID NO: 99830 - protein, 20 aa, Severe acute respiratory syndrome coronavirus 2
NYKLPDDFTGCVIAWNSNNL

SEQ ID NO: 99831 - protein, 20 aa, Severe acute respiratory syndrome coronavirus 2
YKLPDDFTGCVIAWNSNNLD

SEQ ID NO: 99832 - protein, 20 aa, Severe acute respiratory syndrome coronavirus 2
KLPDDFTGCVIAWNSNNLDS

SEQ ID NO: 99833 - protein, 20 aa, Severe acute respiratory syndrome coronavirus 2
LPDDFTGCVIAWNSNNLDSK

SEQ ID NO: 99834 - protein, 20 aa, Severe acute respiratory syndrome coronavirus 2
PDDFTGCVIAWNSNNLDSKV

SEQ ID NO: 99835 - protein, 20 aa, Severe acute respiratory syndrome coronavirus 2
DDFTGCVIAWNSNNLDSKVG

SEQ ID NO: 99836 - protein, 20 aa, Severe acute respiratory syndrome coronavirus 2
DFTGCVIAWNSNNLDSKVGG

SEQ ID NO: 99837 - protein, 20 aa, Severe acute respiratory syndrome coronavirus 2
FTGCVIAWNSNNLDSKVGGN

SEQ ID NO: 99838 - protein, 20 aa, Severe acute respiratory syndrome coronavirus 2
TGCVIAWNSNNLDSKVGGNY

SEQ ID NO: 99839 - protein, 20 aa, Severe acute respiratory syndrome coronavirus 2
GCVIAWNSNNLDSKVGGNYN

SEQ ID NO: 99840 - protein, 20 aa, Severe acute respiratory syndrome coronavirus 2
CVIAWNSNNLDSKVGGNYNY

SEQ ID NO: 99841 - protein, 20 aa, Severe acute respiratory syndrome coronavirus 2
VIAWNSNNLDSKVGGNYNYL

SEQ ID NO: 99842 - protein, 20 aa, Severe acute respiratory syndrome coronavirus 2
IAWNSNNLDSKVGGNYNYLY

SEQ ID NO: 99843 - protein, 20 aa, Severe acute respiratory syndrome coronavirus 2
WNSNNLDSKVGGNYNYLYRL

SEQ ID NO: 99844 - protein, 20 aa, Severe acute respiratory syndrome coronavirus 2
NSNNLDSKVGGNYNYLYRLF

SEQ ID NO: 99845 - protein, 20 aa, Severe acute respiratory syndrome coronavirus 2
SNNLDSKVGGNYNYLYRLFR

SEQ ID NO: 99846 - protein, 20 aa, Severe acute respiratory syndrome coronavirus 2
NNLDSKVGGNYNYLYRLFRK

SEQ ID NO: 99847 - protein, 20 aa, Severe acute respiratory syndrome coronavirus 2
NLDSKVGGNYNYLYRLFRKS

SEQ ID NO: 99848 - protein, 20 aa, Severe acute respiratory syndrome coronavirus 2
LDSKVGGNYNYLYRLFRKSN

SEQ ID NO: 99849 - protein, 20 aa, Severe acute respiratory syndrome coronavirus 2
DSKVGGNYNYLYRLFRKSNL

SEQ ID NO: 99850 - protein, 20 aa, Severe acute respiratory syndrome coronavirus 2
SKVGGNYNYLYRLFRKSNLK

SEQ ID NO: 99851 - protein, 20 aa, Severe acute respiratory syndrome coronavirus 2
KVGGNYNYLYRLFRKSNLKP

SEQ ID NO: 99852 - protein, 20 aa, Severe acute respiratory syndrome coronavirus 2
VGGNYNYLYRLFRKSNLKPF

SEQ ID NO: 99853 - protein, 20 aa, Severe acute respiratory syndrome coronavirus 2
GGNYNYLYRLFRKSNLKPFE

SEQ ID NO: 99854 - protein, 20 aa, Severe acute respiratory syndrome coronavirus 2
GNYNYLYRLFRKSNLKPFER

SEQ ID NO: 99855 - protein, 20 aa, Severe acute respiratory syndrome coronavirus 2
NYNYLYRLFRKSNLKPFERD

SEQ ID NO: 99856 - protein, 20 aa, Severe acute respiratory syndrome coronavirus 2
YGFQPTNGVGYQPYRVVVLS

SEQ ID NO: 99857 - protein, 20 aa, Severe acute respiratory syndrome coronavirus 2
GFQPTNGVGYQPYRVVVLSF

SEQ ID NO: 99858 - protein, 20 aa, Severe acute respiratory syndrome coronavirus 2
FQPTNGVGYQPYRVVVLSFE

SEQ ID NO: 99859 - protein, 20 aa, Severe acute respiratory syndrome coronavirus 2
QPTNGVGYQPYRVVVLSFEL

SEQ ID NO: 99860 - protein, 20 aa, Severe acute respiratory syndrome coronavirus 2
PTNGVGYQPYRVVVLSFELL

SEQ ID NO: 99861 - protein, 20 aa, Severe acute respiratory syndrome coronavirus 2
TNGVGYQPYRVVVLSFELLH

SEQ ID NO: 99862 - protein, 20 aa, Severe acute respiratory syndrome coronavirus 2
ATVCGPKKSTNLVKNKCVNF

SEQ ID NO: 99863 - protein, 20 aa, Severe acute respiratory syndrome coronavirus 2
TVCGPKKSTNLVKNKCVNFN

SEQ ID NO: 99864 - protein, 20 aa, Severe acute respiratory syndrome coronavirus 2
VCGPKKSTNLVKNKCVNFNF

SEQ ID NO: 99865 - protein, 20 aa, Severe acute respiratory syndrome coronavirus 2
CGPKKSTNLVKNKCVNFNFN

SEQ ID NO: 99866 - protein, 20 aa, Severe acute respiratory syndrome coronavirus 2
GPKKSTNLVKNKCVNFNFNG

SEQ ID NO: 99867 - protein, 20 aa, Severe acute respiratory syndrome coronavirus 2
PKKSTNLVKNKCVNFNFNGL

SEQ ID NO: 99868 - protein, 20 aa, Severe acute respiratory syndrome coronavirus 2
KKSTNLVKNKCVNFNFNGLT

SEQ ID NO: 99869 - protein, 20 aa, Severe acute respiratory syndrome coronavirus 2
KSTNLVKNKCVNFNFNGLTG

SEQ ID NO: 99870 - protein, 20 aa, Severe acute respiratory syndrome coronavirus 2
STNLVKNKCVNFNFNGLTGT

SEQ ID NO: 99871 - protein, 20 aa, Severe acute respiratory syndrome coronavirus 2
TNLVKNKCVNFNFNGLTGTG

SEQ ID NO: 99872 - protein, 20 aa, Severe acute respiratory syndrome coronavirus 2
NLVKNKCVNFNFNGLTGTGV

SEQ ID NO: 99873 - protein, 20 aa, Severe acute respiratory syndrome coronavirus 2
LVKNKCVNFNFNGLTGTGVL

SEQ ID NO: 99874 - protein, 20 aa, Severe acute respiratory syndrome coronavirus 2
VKNKCVNFNFNGLTGTGVLT

SEQ ID NO: 99875 - protein, 20 aa, Severe acute respiratory syndrome coronavirus 2
KNKCVNFNFNGLTGTGVLTE

SEQ ID NO: 99876 - protein, 20 aa, Severe acute respiratory syndrome coronavirus 2
NKCVNFNFNGLTGTGVLTES

SEQ ID NO: 99877 - protein, 20 aa, Severe acute respiratory syndrome coronavirus 2
KCVNFNFNGLTGTGVLTESN

SEQ ID NO: 99878 - protein, 20 aa, Severe acute respiratory syndrome coronavirus 2
CVNFNFNGLTGTGVLTESNK

SEQ ID NO: 99879 - protein, 20 aa, Severe acute respiratory syndrome coronavirus 2
GTGVLTESNKKFLPFQQFGR

SEQ ID NO: 99880 - protein, 20 aa, Severe acute respiratory syndrome coronavirus 2
VRDPQTLEILDITPCSFGGV

SEQ ID NO: 99881 - protein, 20 aa, Severe acute respiratory syndrome coronavirus 2
RDPQTLEILDITPCSFGGVS

SEQ ID NO: 99882 - protein, 20 aa, Severe acute respiratory syndrome coronavirus 2
DPQTLEILDITPCSFGGVSV

SEQ ID NO: 99883 - protein, 20 aa, Severe acute respiratory syndrome coronavirus 2
PQTLEILDITPCSFGGVSVI

SEQ ID NO: 99884 - protein, 20 aa, Severe acute respiratory syndrome coronavirus 2
QTLEILDITPCSFGGVSVIT

SEQ ID NO: 99885 - protein, 20 aa, Severe acute respiratory syndrome coronavirus 2
TLEILDITPCSFGGVSVITP

SEQ ID NO: 99886 - protein, 20 aa, Severe acute respiratory syndrome coronavirus 2
LEILDITPCSFGGVSVITPG

SEQ ID NO: 99887 - protein, 20 aa, Severe acute respiratory syndrome coronavirus 2
EILDITPCSFGGVSVITPGT

SEQ ID NO: 99888 - protein, 20 aa, Severe acute respiratory syndrome coronavirus 2
QLTPTWRVYSTGSNVFQTRA

SEQ ID NO: 99889 - protein, 20 aa, Severe acute respiratory syndrome coronavirus 2
LTPTWRVYSTGSNVFQTRAG

SEQ ID NO: 99890 - protein, 20 aa, Severe acute respiratory syndrome coronavirus 2
TPTWRVYSTGSNVFQTRAGC

SEQ ID NO: 99891 - protein, 20 aa, Severe acute respiratory syndrome coronavirus 2
PTWRVYSTGSNVFQTRAGCL

SEQ ID NO: 99892 - protein, 20 aa, Severe acute respiratory syndrome coronavirus 2
TWRVYSTGSNVFQTRAGCLI

SEQ ID NO: 99893 - protein, 20 aa, Severe acute respiratory syndrome coronavirus 2
WRVYSTGSNVFQTRAGCLIG

SEQ ID NO: 99894 - protein, 20 aa, Severe acute respiratory syndrome coronavirus 2
RVYSTGSNVFQTRAGCLIGA

SEQ ID NO: 99895 - protein, 20 aa, Severe acute respiratory syndrome coronavirus 2
YICGDSTECSNLLLQYGSFC

SEQ ID NO: 99896 - protein, 20 aa, Severe acute respiratory syndrome coronavirus 2
ICGDSTECSNLLLQYGSFCT

SEQ ID NO: 99897 - protein, 20 aa, Severe acute respiratory syndrome coronavirus 2
CGDSTECSNLLLQYGSFCTQ

SEQ ID NO: 99898 - protein, 20 aa, Severe acute respiratory syndrome coronavirus 2
GDSTECSNLLLQYGSFCTQL

SEQ ID NO: 99899 - protein, 20 aa, Severe acute respiratory syndrome coronavirus 2
DSTECSNLLLQYGSFCTQLN

SEQ ID NO: 99900 - protein, 20 aa, Severe acute respiratory syndrome coronavirus 2
GWTFGAGAALQIPFAMQMAY

SEQ ID NO: 99901 - protein, 20 aa, Severe acute respiratory syndrome coronavirus 2
WTFGAGAALQIPFAMQMAYR

SEQ ID NO: 99902 - protein, 20 aa, Severe acute respiratory syndrome coronavirus 2
TFGAGAALQIPFAMQMAYRF

SEQ ID NO: 99903 - protein, 20 aa, Severe acute respiratory syndrome coronavirus 2
FGAGAALQIPFAMQMAYRFN

SEQ ID NO: 99904 - protein, 20 aa, Severe acute respiratory syndrome coronavirus 2
GAGAALQIPFAMQMAYRFNG

SEQ ID NO: 99905 - protein, 20 aa, Severe acute respiratory syndrome coronavirus 2
AGAALQIPFAMQMAYRFNGI

SEQ ID NO: 99906 - protein, 20 aa, Severe acute respiratory syndrome coronavirus 2
GAALQIPFAMQMAYRFNGIG

SEQ ID NO: 99907 - protein, 20 aa, Severe acute respiratory syndrome coronavirus 2
AALQIPFAMQMAYRFNGIGV

SEQ ID NO: 99908 - protein, 20 aa, Severe acute respiratory syndrome coronavirus 2
ALQIPFAMQMAYRFNGIGVT

SEQ ID NO: 99909 - protein, 20 aa, Severe acute respiratory syndrome coronavirus 2
LQIPFAMQMAYRFNGIGVTQ

SEQ ID NO: 99910 - protein, 20 aa, Severe acute respiratory syndrome coronavirus 2
QIPFAMQMAYRFNGIGVTQN

SEQ ID NO: 99911 - protein, 20 aa, Severe acute respiratory syndrome coronavirus 2
IPFAMQMAYRFNGIGVTQNV

SEQ ID NO: 99912 - protein, 20 aa, Severe acute respiratory syndrome coronavirus 2
PFAMQMAYRFNGIGVTQNVL

SEQ ID NO: 99913 - protein, 20 aa, Severe acute respiratory syndrome coronavirus 2
FAMQMAYRFNGIGVTQNVLY

SEQ ID NO: 99914 - protein, 20 aa, Severe acute respiratory syndrome coronavirus 2
AMQMAYRFNGIGVTQNVLYE

SEQ ID NO: 99915 - protein, 20 aa, Severe acute respiratory syndrome coronavirus 2
MQMAYRFNGIGVTQNVLYEN

SEQ ID NO: 99916 - protein, 20 aa, Severe acute respiratory syndrome coronavirus 2
QMAYRFNGIGVTQNVLYENQ

SEQ ID NO: 99917 - protein, 20 aa, Severe acute respiratory syndrome coronavirus 2
MAYRFNGIGVTQNVLYENQK

SEQ ID NO: 99918 - protein, 20 aa, Severe acute respiratory syndrome coronavirus 2
AYRFNGIGVTQNVLYENQKL

SEQ ID NO: 99919 - protein, 20 aa, Severe acute respiratory syndrome coronavirus 2
YRFNGIGVTQNVLYENQKLI

SEQ ID NO: 99920 - protein, 20 aa, Severe acute respiratory syndrome coronavirus 2
RFNGIGVTQNVLYENQKLIA

SEQ ID NO: 99921 - protein, 20 aa, Severe acute respiratory syndrome coronavirus 2
FNGIGVTQNVLYENQKLIAN

SEQ ID NO: 99922 - protein, 20 aa, Severe acute respiratory syndrome coronavirus 2
NGIGVTQNVLYENQKLIANQ

SEQ ID NO: 99923 - protein, 20 aa, Severe acute respiratory syndrome coronavirus 2
GIGVTQNVLYENQKLIANQF

SEQ ID NO: 99924 - protein, 20 aa, Severe acute respiratory syndrome coronavirus 2
IGVTQNVLYENQKLIANQFN

SEQ ID NO: 99925 - protein, 20 aa, Severe acute respiratory syndrome coronavirus 2
LVKQLSSNFGAISSVLNDIL

SEQ ID NO: 99926 - protein, 20 aa, Severe acute respiratory syndrome coronavirus 2
VKQLSSNFGAISSVLNDILS

SEQ ID NO: 99927 - protein, 20 aa, Severe acute respiratory syndrome coronavirus 2
KQLSSNFGAISSVLNDILSR

SEQ ID NO: 99928 - protein, 20 aa, Severe acute respiratory syndrome coronavirus 2
QLSSNFGAISSVLNDILSRL

SEQ ID NO: 99929 - protein, 20 aa, Severe acute respiratory syndrome coronavirus 2
LSSNFGAISSVLNDILSRLD

SEQ ID NO: 99930 - protein, 20 aa, Severe acute respiratory syndrome coronavirus 2
SSNFGAISSVLNDILSRLDK

SEQ ID NO: 99931 - protein, 20 aa, Severe acute respiratory syndrome coronavirus 2
SNFGAISSVLNDILSRLDKV

SEQ ID NO: 99932 - protein, 20 aa, Severe acute respiratory syndrome coronavirus 2
NFGAISSVLNDILSRLDKVE

SEQ ID NO: 99933 - protein, 20 aa, Severe acute respiratory syndrome coronavirus 2
FGAISSVLNDILSRLDKVEA

SEQ ID NO: 99934 - protein, 20 aa, Severe acute respiratory syndrome coronavirus 2
GAISSVLNDILSRLDKVEAE

SEQ ID NO: 99935 - protein, 20 aa, Severe acute respiratory syndrome coronavirus 2
AISSVLNDILSRLDKVEAEV

SEQ ID NO: 99936 - protein, 20 aa, Severe acute respiratory syndrome coronavirus 2
ISSVLNDILSRLDKVEAEVQ

SEQ ID NO: 99937 - protein, 20 aa, Severe acute respiratory syndrome coronavirus 2
SSVLNDILSRLDKVEAEVQI

SEQ ID NO: 99938 - protein, 20 aa, Severe acute respiratory syndrome coronavirus 2
SVLNDILSRLDKVEAEVQID

SEQ ID NO: 99939 - protein, 20 aa, Severe acute respiratory syndrome coronavirus 2
VLNDILSRLDKVEAEVQIDR

SEQ ID NO: 99940 - protein, 20 aa, Severe acute respiratory syndrome coronavirus 2
LNDILSRLDKVEAEVQIDRL

SEQ ID NO: 99941 - protein, 20 aa, Severe acute respiratory syndrome coronavirus 2
NDILSRLDKVEAEVQIDRLI

SEQ ID NO: 99942 - protein, 20 aa, Severe acute respiratory syndrome coronavirus 2
DILSRLDKVEAEVQIDRLIT

SEQ ID NO: 99943 - protein, 20 aa, Severe acute respiratory syndrome coronavirus 2
ILSRLDKVEAEVQIDRLITG

SEQ ID NO: 99944 - protein, 20 aa, Severe acute respiratory syndrome coronavirus 2
LSRLDKVEAEVQIDRLITGR

SEQ ID NO: 99945 - protein, 20 aa, Severe acute respiratory syndrome coronavirus 2
SRLDKVEAEVQIDRLITGRL

SEQ ID NO: 99946 - protein, 20 aa, Severe acute respiratory syndrome coronavirus 2
RLDKVEAEVQIDRLITGRLQ

SEQ ID NO: 99947 - protein, 20 aa, Severe acute respiratory syndrome coronavirus 2
LDKVEAEVQIDRLITGRLQS

SEQ ID NO: 99948 - protein, 20 aa, Severe acute respiratory syndrome coronavirus 2
DKVEAEVQIDRLITGRLQSL

SEQ ID NO: 99949 - protein, 20 aa, Severe acute respiratory syndrome coronavirus 2
KVEAEVQIDRLITGRLQSLQ

SEQ ID NO: 99950 - protein, 20 aa, Severe acute respiratory syndrome coronavirus 2
VEAEVQIDRLITGRLQSLQT

SEQ ID NO: 99951 - protein, 20 aa, Severe acute respiratory syndrome coronavirus 2
EAEVQIDRLITGRLQSLQTY

SEQ ID NO: 99952 - protein, 20 aa, Severe acute respiratory syndrome coronavirus 2
AEVQIDRLITGRLQSLQTYV

SEQ ID NO: 99953 - protein, 20 aa, Severe acute respiratory syndrome coronavirus 2
EVQIDRLITGRLQSLQTYVT

SEQ ID NO: 99954 - protein, 20 aa, Severe acute respiratory syndrome coronavirus 2
VQIDRLITGRLQSLQTYVTQ

SEQ ID NO: 99955 - protein, 20 aa, Severe acute respiratory syndrome coronavirus 2
QIDRLITGRLQSLQTYVTQQ

SEQ ID NO: 99956 - protein, 20 aa, Severe acute respiratory syndrome coronavirus 2
IDRLITGRLQSLQTYVTQQL

SEQ ID NO: 99957 - protein, 20 aa, Severe acute respiratory syndrome coronavirus 2
DRLITGRLQSLQTYVTQQLI

SEQ ID NO: 99958 - protein, 20 aa, Severe acute respiratory syndrome coronavirus 2
RLITGRLQSLQTYVTQQLIR

SEQ ID NO: 99959 - protein, 20 aa, Severe acute respiratory syndrome coronavirus 2
LITGRLQSLQTYVTQQLIRA

SEQ ID NO: 99960 - protein, 20 aa, Severe acute respiratory syndrome coronavirus 2
ITGRLQSLQTYVTQQLIRAA

SEQ ID NO: 99961 - protein, 20 aa, Severe acute respiratory syndrome coronavirus 2
TGRLQSLQTYVTQQLIRAAE

SEQ ID NO: 99962 - protein, 20 aa, Severe acute respiratory syndrome coronavirus 2
GRLQSLQTYVTQQLIRAAEI

SEQ ID NO: 99963 - protein, 20 aa, Severe acute respiratory syndrome coronavirus 2
RLQSLQTYVTQQLIRAAEIR

SEQ ID NO: 99964 - protein, 20 aa, Severe acute respiratory syndrome coronavirus 2
KMSECVLGQSKRVDFCGKGY

SEQ ID NO: 99965 - protein, 20 aa, Severe acute respiratory syndrome coronavirus 2
MSECVLGQSKRVDFCGKGYH

SEQ ID NO: 99966 - protein, 20 aa, Severe acute respiratory syndrome coronavirus 2
SECVLGQSKRVDFCGKGYHL

SEQ ID NO: 99967 - protein, 20 aa, Severe acute respiratory syndrome coronavirus 2
ECVLGQSKRVDFCGKGYHLM

SEQ ID NO: 99968 - protein, 20 aa, Severe acute respiratory syndrome coronavirus 2
VLGQSKRVDFCGKGYHLMSF

SEQ ID NO: 99969 - protein, 20 aa, Severe acute respiratory syndrome coronavirus 2
LGQSKRVDFCGKGYHLMSFP

SEQ ID NO: 99970 - protein, 20 aa, Severe acute respiratory syndrome coronavirus 2
GQSKRVDFCGKGYHLMSFPQ

SEQ ID NO: 99971 - protein, 20 aa, Severe acute respiratory syndrome coronavirus 2
QSKRVDFCGKGYHLMSFPQS

SEQ ID NO: 99972 - protein, 20 aa, Severe acute respiratory syndrome coronavirus 2
SKRVDFCGKGYHLMSFPQSA

SEQ ID NO: 99973 - protein, 20 aa, Severe acute respiratory syndrome coronavirus 2
KRVDFCGKGYHLMSFPQSAP

SEQ ID NO: 99974 - protein, 20 aa, Severe acute respiratory syndrome coronavirus 2
RVDFCGKGYHLMSFPQSAPH

SEQ ID NO: 99975 - protein, 20 aa, Severe acute respiratory syndrome coronavirus 2
VDFCGKGYHLMSFPQSAPHG

SEQ ID NO: 99976 - protein, 20 aa, Severe acute respiratory syndrome coronavirus 2
DFCGKGYHLMSFPQSAPHGV

SEQ ID NO: 99977 - protein, 20 aa, Severe acute respiratory syndrome coronavirus 2
FCGKGYHLMSFPQSAPHGVV

SEQ ID NO: 99978 - protein, 20 aa, Severe acute respiratory syndrome coronavirus 2
CGKGYHLMSFPQSAPHGVVF

SEQ ID NO: 99979 - protein, 20 aa, Severe acute respiratory syndrome coronavirus 2
GKGYHLMSFPQSAPHGVVFL

SEQ ID NO: 99980 - protein, 20 aa, Severe acute respiratory syndrome coronavirus 2
KGYHLMSFPQSAPHGVVFLH

SEQ ID NO: 99981 - protein, 20 aa, Severe acute respiratory syndrome coronavirus 2
GYHLMSFPQSAPHGVVFLHV

SEQ ID NO: 99982 - protein, 20 aa, Severe acute respiratory syndrome coronavirus 2
YHLMSFPQSAPHGVVFLHVT

SEQ ID NO: 99983 - protein, 20 aa, Severe acute respiratory syndrome coronavirus 2
HLMSFPQSAPHGVVFLHVTY

SEQ ID NO: 99984 - protein, 20 aa, Severe acute respiratory syndrome coronavirus 2
LMSFPQSAPHGVVFLHVTYV

SEQ ID NO: 99985 - protein, 20 aa, Severe acute respiratory syndrome coronavirus 2
MSFPQSAPHGVVFLHVTYVP

SEQ ID NO: 99986 - protein, 20 aa, Severe acute respiratory syndrome coronavirus 2
SFPQSAPHGVVFLHVTYVPA

SEQ ID NO: 99987 - protein, 20 aa, Severe acute respiratory syndrome coronavirus 2
FPQSAPHGVVFLHVTYVPAQ

SEQ ID NO: 99988 - protein, 20 aa, Severe acute respiratory syndrome coronavirus 2
PQSAPHGVVFLHVTYVPAQE

SEQ ID NO: 99989 - protein, 20 aa, Severe acute respiratory syndrome coronavirus 2
QSAPHGVVFLHVTYVPAQEK

SEQ ID NO: 99990 - protein, 20 aa, Severe acute respiratory syndrome coronavirus 2
WFVTQRNFYEPQIITTDNTF

SEQ ID NO: 99991 - protein, 21 aa, Severe acute respiratory syndrome coronavirus 2
NIIRGWIFGTTLDSKTQSLLI

SEQ ID NO: 99992 - protein, 21 aa, Severe acute respiratory syndrome coronavirus 2
KNLREFVFKNIDGYFKIYSKH

SEQ ID NO: 99993 - protein, 21 aa, Severe acute respiratory syndrome coronavirus 2
NLREFVFKNIDGYFKIYSKHT

SEQ ID NO: 99994 - protein, 21 aa, Severe acute respiratory syndrome coronavirus 2
LREFVFKNIDGYFKIYSKHTP

SEQ ID NO: 99995 - protein, 21 aa, Severe acute respiratory syndrome coronavirus 2
REFVFKNIDGYFKIYSKHTPI

SEQ ID NO: 99996 - protein, 21 aa, Severe acute respiratory syndrome coronavirus 2
EFVFKNIDGYFKIYSKHTPIN

SEQ ID NO: 99997 - protein, 21 aa, Severe acute respiratory syndrome coronavirus 2
FVFKNIDGYFKIYSKHTPINL

SEQ ID NO: 99998 - protein, 21 aa, Severe acute respiratory syndrome coronavirus 2
VFKNIDGYFKIYSKHTPINLV

SEQ ID NO: 99999 - protein, 21 aa, Severe acute respiratory syndrome coronavirus 2
FKNIDGYFKIYSKHTPINLVR

SEQ ID NO: 100000 - protein, 21 aa, Severe acute respiratory syndrome coronavirus 2
GTITDAVDCALDPLSETKCTL

SEQ ID NO: 100001 - protein, 21 aa, Severe acute respiratory syndrome coronavirus 2
TITDAVDCALDPLSETKCTLK

SEQ ID NO: 100002 - protein, 21 aa, Severe acute respiratory syndrome coronavirus 2
TRFASVYAWNRKRISNCVADY

SEQ ID NO: 100003 - protein, 21 aa, Severe acute respiratory syndrome coronavirus 2
RFASVYAWNRKRISNCVADYS

SEQ ID NO: 100004 - protein, 21 aa, Severe acute respiratory syndrome coronavirus 2
KLNDLCFTNVYADSFVIRGDE

SEQ ID NO: 100005 - protein, 21 aa, Severe acute respiratory syndrome coronavirus 2
LNDLCFTNVYADSFVIRGDEV

SEQ ID NO: 100006 - protein, 21 aa, Severe acute respiratory syndrome coronavirus 2
NDLCFTNVYADSFVIRGDEVR

SEQ ID NO: 100007 - protein, 21 aa, Severe acute respiratory syndrome coronavirus 2
DLCFTNVYADSFVIRGDEVRQ

SEQ ID NO: 100008 - protein, 21 aa, Severe acute respiratory syndrome coronavirus 2
LCFTNVYADSFVIRGDEVRQI

SEQ ID NO: 100009 - protein, 21 aa, Severe acute respiratory syndrome coronavirus 2
CFTNVYADSFVIRGDEVRQIA

SEQ ID NO: 100010 - protein, 21 aa, Severe acute respiratory syndrome coronavirus 2
FTNVYADSFVIRGDEVRQIAP

SEQ ID NO: 100011 - protein, 21 aa, Severe acute respiratory syndrome coronavirus 2
TNVYADSFVIRGDEVRQIAPG

SEQ ID NO: 100012 - protein, 21 aa, Severe acute respiratory syndrome coronavirus 2
RGDEVRQIAPGQTGKIADYNY

SEQ ID NO: 100013 - protein, 21 aa, Severe acute respiratory syndrome coronavirus 2
GDEVRQIAPGQTGKIADYNYK

SEQ ID NO: 100014 - protein, 21 aa, Severe acute respiratory syndrome coronavirus 2
DEVRQIAPGQTGKIADYNYKL

SEQ ID NO: 100015 - protein, 21 aa, Severe acute respiratory syndrome coronavirus 2
EVRQIAPGQTGKIADYNYKLP

SEQ ID NO: 100016 - protein, 21 aa, Severe acute respiratory syndrome coronavirus 2
VRQIAPGQTGKIADYNYKLPD

SEQ ID NO: 100017 - protein, 21 aa, Severe acute respiratory syndrome coronavirus 2
RQIAPGQTGKIADYNYKLPDD

SEQ ID NO: 100018 - protein, 21 aa, Severe acute respiratory syndrome coronavirus 2
ADYNYKLPDDFTGCVIAWNSN

SEQ ID NO: 100019 - protein, 21 aa, Severe acute respiratory syndrome coronavirus 2
DYNYKLPDDFTGCVIAWNSNN

SEQ ID NO: 100020 - protein, 21 aa, Severe acute respiratory syndrome coronavirus 2
YNYKLPDDFTGCVIAWNSNNL

SEQ ID NO: 100021 - protein, 21 aa, Severe acute respiratory syndrome coronavirus 2
NYKLPDDFTGCVIAWNSNNLD

SEQ ID NO: 100022 - protein, 21 aa, Severe acute respiratory syndrome coronavirus 2
YKLPDDFTGCVIAWNSNNLDS

SEQ ID NO: 100023 - protein, 21 aa, Severe acute respiratory syndrome coronavirus 2
KLPDDFTGCVIAWNSNNLDSK

SEQ ID NO: 100024 - protein, 21 aa, Severe acute respiratory syndrome coronavirus 2
LPDDFTGCVIAWNSNNLDSKV

SEQ ID NO: 100025 - protein, 21 aa, Severe acute respiratory syndrome coronavirus 2
PDDFTGCVIAWNSNNLDSKVG

SEQ ID NO: 100026 - protein, 21 aa, Severe acute respiratory syndrome coronavirus 2
DDFTGCVIAWNSNNLDSKVGG

SEQ ID NO: 100027 - protein, 21 aa, Severe acute respiratory syndrome coronavirus 2
DFTGCVIAWNSNNLDSKVGGN

SEQ ID NO: 100028 - protein, 21 aa, Severe acute respiratory syndrome coronavirus 2
FTGCVIAWNSNNLDSKVGGNY

SEQ ID NO: 100029 - protein, 21 aa, Severe acute respiratory syndrome coronavirus 2
TGCVIAWNSNNLDSKVGGNYN

SEQ ID NO: 100030 - protein, 21 aa, Severe acute respiratory syndrome coronavirus 2
GCVIAWNSNNLDSKVGGNYNY

SEQ ID NO: 100031 - protein, 21 aa, Severe acute respiratory syndrome coronavirus 2
CVIAWNSNNLDSKVGGNYNYL

SEQ ID NO: 100032 - protein, 21 aa, Severe acute respiratory syndrome coronavirus 2
VIAWNSNNLDSKVGGNYNYLY

SEQ ID NO: 100033 - protein, 21 aa, Severe acute respiratory syndrome coronavirus 2
IAWNSNNLDSKVGGNYNYLYR

SEQ ID NO: 100034 - protein, 21 aa, Severe acute respiratory syndrome coronavirus 2
AWNSNNLDSKVGGNYNYLYRL

SEQ ID NO: 100035 - protein, 21 aa, Severe acute respiratory syndrome coronavirus 2
WNSNNLDSKVGGNYNYLYRLF

SEQ ID NO: 100036 - protein, 21 aa, Severe acute respiratory syndrome coronavirus 2
NSNNLDSKVGGNYNYLYRLFR

SEQ ID NO: 100037 - protein, 21 aa, Severe acute respiratory syndrome coronavirus 2
SNNLDSKVGGNYNYLYRLFRK

SEQ ID NO: 100038 - protein, 21 aa, Severe acute respiratory syndrome coronavirus 2
NNLDSKVGGNYNYLYRLFRKS

SEQ ID NO: 100039 - protein, 21 aa, Severe acute respiratory syndrome coronavirus 2
NLDSKVGGNYNYLYRLFRKSN

SEQ ID NO: 100040 - protein, 21 aa, Severe acute respiratory syndrome coronavirus 2
LDSKVGGNYNYLYRLFRKSNL

SEQ ID NO: 100041 - protein, 21 aa, Severe acute respiratory syndrome coronavirus 2
DSKVGGNYNYLYRLFRKSNLK

SEQ ID NO: 100042 - protein, 21 aa, Severe acute respiratory syndrome coronavirus 2
SKVGGNYNYLYRLFRKSNLKP

SEQ ID NO: 100043 - protein, 21 aa, Severe acute respiratory syndrome coronavirus 2
KVGGNYNYLYRLFRKSNLKPF

SEQ ID NO: 100044 - protein, 21 aa, Severe acute respiratory syndrome coronavirus 2
VGGNYNYLYRLFRKSNLKPFE

SEQ ID NO: 100045 - protein, 21 aa, Severe acute respiratory syndrome coronavirus 2
GGNYNYLYRLFRKSNLKPFER

SEQ ID NO: 100046 - protein, 21 aa, Severe acute respiratory syndrome coronavirus 2
GNYNYLYRLFRKSNLKPFERD

SEQ ID NO: 100047 - protein, 21 aa, Severe acute respiratory syndrome coronavirus 2
YGFQPTNGVGYQPYRVVVLSF

SEQ ID NO: 100048 - protein, 21 aa, Severe acute respiratory syndrome coronavirus 2
GFQPTNGVGYQPYRVVVLSFE

SEQ ID NO: 100049 - protein, 21 aa, Severe acute respiratory syndrome coronavirus 2
FQPTNGVGYQPYRVVVLSFEL

SEQ ID NO: 100050 - protein, 21 aa, Severe acute respiratory syndrome coronavirus 2
QPTNGVGYQPYRVVVLSFELL

SEQ ID NO: 100051 - protein, 21 aa, Severe acute respiratory syndrome coronavirus 2
PTNGVGYQPYRVVVLSFELLH

SEQ ID NO: 100052 - protein, 21 aa, Severe acute respiratory syndrome coronavirus 2
PATVCGPKKSTNLVKNKCVNF

SEQ ID NO: 100053 - protein, 21 aa, Severe acute respiratory syndrome coronavirus 2
ATVCGPKKSTNLVKNKCVNFN

SEQ ID NO: 100054 - protein, 21 aa, Severe acute respiratory syndrome coronavirus 2
TVCGPKKSTNLVKNKCVNFNF

SEQ ID NO: 100055 - protein, 21 aa, Severe acute respiratory syndrome coronavirus 2
VCGPKKSTNLVKNKCVNFNFN

SEQ ID NO: 100056 - protein, 21 aa, Severe acute respiratory syndrome coronavirus 2
CGPKKSTNLVKNKCVNFNFNG

SEQ ID NO: 100057 - protein, 21 aa, Severe acute respiratory syndrome coronavirus 2
GPKKSTNLVKNKCVNFNFNGL

SEQ ID NO: 100058 - protein, 21 aa, Severe acute respiratory syndrome coronavirus 2
PKKSTNLVKNKCVNFNFNGLT

SEQ ID NO: 100059 - protein, 21 aa, Severe acute respiratory syndrome coronavirus 2
KKSTNLVKNKCVNFNFNGLTG

SEQ ID NO: 100060 - protein, 21 aa, Severe acute respiratory syndrome coronavirus 2
KSTNLVKNKCVNFNFNGLTGT

SEQ ID NO: 100061 - protein, 21 aa, Severe acute respiratory syndrome coronavirus 2
STNLVKNKCVNFNFNGLTGTG

SEQ ID NO: 100062 - protein, 21 aa, Severe acute respiratory syndrome coronavirus 2
TNLVKNKCVNFNFNGLTGTGV

SEQ ID NO: 100063 - protein, 21 aa, Severe acute respiratory syndrome coronavirus 2
NLVKNKCVNFNFNGLTGTGVL

SEQ ID NO: 100064 - protein, 21 aa, Severe acute respiratory syndrome coronavirus 2
LVKNKCVNFNFNGLTGTGVLT

SEQ ID NO: 100065 - protein, 21 aa, Severe acute respiratory syndrome coronavirus 2
VKNKCVNFNFNGLTGTGVLTE

SEQ ID NO: 100066 - protein, 21 aa, Severe acute respiratory syndrome coronavirus 2
KNKCVNFNFNGLTGTGVLTES

SEQ ID NO: 100067 - protein, 21 aa, Severe acute respiratory syndrome coronavirus 2
NKCVNFNFNGLTGTGVLTESN

SEQ ID NO: 100068 - protein, 21 aa, Severe acute respiratory syndrome coronavirus 2
KCVNFNFNGLTGTGVLTESNK

SEQ ID NO: 100069 - protein, 21 aa, Severe acute respiratory syndrome coronavirus 2
VRDPQTLEILDITPCSFGGVS

SEQ ID NO: 100070 - protein, 21 aa, Severe acute respiratory syndrome coronavirus 2
RDPQTLEILDITPCSFGGVSV

SEQ ID NO: 100071 - protein, 21 aa, Severe acute respiratory syndrome coronavirus 2
DPQTLEILDITPCSFGGVSVI

SEQ ID NO: 100072 - protein, 21 aa, Severe acute respiratory syndrome coronavirus 2
PQTLEILDITPCSFGGVSVIT

SEQ ID NO: 100073 - protein, 21 aa, Severe acute respiratory syndrome coronavirus 2
QTLEILDITPCSFGGVSVITP

SEQ ID NO: 100074 - protein, 21 aa, Severe acute respiratory syndrome coronavirus 2
TLEILDITPCSFGGVSVITPG

SEQ ID NO: 100075 - protein, 21 aa, Severe acute respiratory syndrome coronavirus 2
LEILDITPCSFGGVSVITPGT

SEQ ID NO: 100076 - protein, 21 aa, Severe acute respiratory syndrome coronavirus 2
QLTPTWRVYSTGSNVFQTRAG

SEQ ID NO: 100077 - protein, 21 aa, Severe acute respiratory syndrome coronavirus 2
LTPTWRVYSTGSNVFQTRAGC

SEQ ID NO: 100078 - protein, 21 aa, Severe acute respiratory syndrome coronavirus 2
TPTWRVYSTGSNVFQTRAGCL

SEQ ID NO: 100079 - protein, 21 aa, Severe acute respiratory syndrome coronavirus 2
PTWRVYSTGSNVFQTRAGCLI

SEQ ID NO: 100080 - protein, 21 aa, Severe acute respiratory syndrome coronavirus 2
TWRVYSTGSNVFQTRAGCLIG

SEQ ID NO: 100081 - protein, 21 aa, Severe acute respiratory syndrome coronavirus 2
WRVYSTGSNVFQTRAGCLIGA

SEQ ID NO: 100082 - protein, 21 aa, Severe acute respiratory syndrome coronavirus 2
YICGDSTECSNLLLQYGSFCT

SEQ ID NO: 100083 - protein, 21 aa, Severe acute respiratory syndrome coronavirus 2
ICGDSTECSNLLLQYGSFCTQ

SEQ ID NO: 100084 - protein, 21 aa, Severe acute respiratory syndrome coronavirus 2
CGDSTECSNLLLQYGSFCTQL

SEQ ID NO: 100085 - protein, 21 aa, Severe acute respiratory syndrome coronavirus 2
GDSTECSNLLLQYGSFCTQLN

SEQ ID NO: 100086 - protein, 21 aa, Severe acute respiratory syndrome coronavirus 2
GWTFGAGAALQIPFAMQMAYR

SEQ ID NO: 100087 - protein, 21 aa, Severe acute respiratory syndrome coronavirus 2
WTFGAGAALQIPFAMQMAYRF

SEQ ID NO: 100088 - protein, 21 aa, Severe acute respiratory syndrome coronavirus 2
TFGAGAALQIPFAMQMAYRFN

SEQ ID NO: 100089 - protein, 21 aa, Severe acute respiratory syndrome coronavirus 2
FGAGAALQIPFAMQMAYRFNG

SEQ ID NO: 100090 - protein, 21 aa, Severe acute respiratory syndrome coronavirus 2
GAGAALQIPFAMQMAYRFNGI

SEQ ID NO: 100091 - protein, 21 aa, Severe acute respiratory syndrome coronavirus 2
AGAALQIPFAMQMAYRFNGIG

SEQ ID NO: 100092 - protein, 21 aa, Severe acute respiratory syndrome coronavirus 2
GAALQIPFAMQMAYRFNGIGV

SEQ ID NO: 100093 - protein, 21 aa, Severe acute respiratory syndrome coronavirus 2
AALQIPFAMQMAYRFNGIGVT

SEQ ID NO: 100094 - protein, 21 aa, Severe acute respiratory syndrome coronavirus 2
ALQIPFAMQMAYRFNGIGVTQ

SEQ ID NO: 100095 - protein, 21 aa, Severe acute respiratory syndrome coronavirus 2
LQIPFAMQMAYRFNGIGVTQN

SEQ ID NO: 100096 - protein, 21 aa, Severe acute respiratory syndrome coronavirus 2
QIPFAMQMAYRFNGIGVTQNV

SEQ ID NO: 100097 - protein, 21 aa, Severe acute respiratory syndrome coronavirus 2
IPFAMQMAYRFNGIGVTQNVL

SEQ ID NO: 100098 - protein, 21 aa, Severe acute respiratory syndrome coronavirus 2
PFAMQMAYRFNGIGVTQNVLY

SEQ ID NO: 100099 - protein, 21 aa, Severe acute respiratory syndrome coronavirus 2
FAMQMAYRFNGIGVTQNVLYE

SEQ ID NO: 100100 - protein, 21 aa, Severe acute respiratory syndrome coronavirus 2
AMQMAYRFNGIGVTQNVLYEN

SEQ ID NO: 100101 - protein, 21 aa, Severe acute respiratory syndrome coronavirus 2
MQMAYRFNGIGVTQNVLYENQ

SEQ ID NO: 100102 - protein, 21 aa, Severe acute respiratory syndrome coronavirus 2
QMAYRFNGIGVTQNVLYENQK

SEQ ID NO: 100103 - protein, 21 aa, Severe acute respiratory syndrome coronavirus 2
MAYRFNGIGVTQNVLYENQKL

SEQ ID NO: 100104 - protein, 21 aa, Severe acute respiratory syndrome coronavirus 2
AYRFNGIGVTQNVLYENQKLI

SEQ ID NO: 100105 - protein, 21 aa, Severe acute respiratory syndrome coronavirus 2
YRFNGIGVTQNVLYENQKLIA

SEQ ID NO: 100106 - protein, 21 aa, Severe acute respiratory syndrome coronavirus 2
RFNGIGVTQNVLYENQKLIAN

SEQ ID NO: 100107 - protein, 21 aa, Severe acute respiratory syndrome coronavirus 2
FNGIGVTQNVLYENQKLIANQ

SEQ ID NO: 100108 - protein, 21 aa, Severe acute respiratory syndrome coronavirus 2
NGIGVTQNVLYENQKLIANQF

SEQ ID NO: 100109 - protein, 21 aa, Severe acute respiratory syndrome coronavirus 2
GIGVTQNVLYENQKLIANQFN

SEQ ID NO: 100110 - protein, 21 aa, Severe acute respiratory syndrome coronavirus 2
LVKQLSSNFGAISSVLNDILS

SEQ ID NO: 100111 - protein, 21 aa, Severe acute respiratory syndrome coronavirus 2
VKQLSSNFGAISSVLNDILSR

SEQ ID NO: 100112 - protein, 21 aa, Severe acute respiratory syndrome coronavirus 2
KQLSSNFGAISSVLNDILSRL

SEQ ID NO: 100113 - protein, 21 aa, Severe acute respiratory syndrome coronavirus 2
QLSSNFGAISSVLNDILSRLD

SEQ ID NO: 100114 - protein, 21 aa, Severe acute respiratory syndrome coronavirus 2
LSSNFGAISSVLNDILSRLDK

SEQ ID NO: 100115 - protein, 21 aa, Severe acute respiratory syndrome coronavirus 2
SSNFGAISSVLNDILSRLDKV

SEQ ID NO: 100116 - protein, 21 aa, Severe acute respiratory syndrome coronavirus 2
SNFGAISSVLNDILSRLDKVE

SEQ ID NO: 100117 - protein, 21 aa, Severe acute respiratory syndrome coronavirus 2
NFGAISSVLNDILSRLDKVEA

SEQ ID NO: 100118 - protein, 21 aa, Severe acute respiratory syndrome coronavirus 2
FGAISSVLNDILSRLDKVEAE

SEQ ID NO: 100119 - protein, 21 aa, Severe acute respiratory syndrome coronavirus 2
GAISSVLNDILSRLDKVEAEV

SEQ ID NO: 100120 - protein, 21 aa, Severe acute respiratory syndrome coronavirus 2
AISSVLNDILSRLDKVEAEVQ

SEQ ID NO: 100121 - protein, 21 aa, Severe acute respiratory syndrome coronavirus 2
ISSVLNDILSRLDKVEAEVQI

SEQ ID NO: 100122 - protein, 21 aa, Severe acute respiratory syndrome coronavirus 2
SSVLNDILSRLDKVEAEVQID

SEQ ID NO: 100123 - protein, 21 aa, Severe acute respiratory syndrome coronavirus 2
SVLNDILSRLDKVEAEVQIDR

SEQ ID NO: 100124 - protein, 21 aa, Severe acute respiratory syndrome coronavirus 2
VLNDILSRLDKVEAEVQIDRL

SEQ ID NO: 100125 - protein, 21 aa, Severe acute respiratory syndrome coronavirus 2
LNDILSRLDKVEAEVQIDRLI

SEQ ID NO: 100126 - protein, 21 aa, Severe acute respiratory syndrome coronavirus 2
NDILSRLDKVEAEVQIDRLIT

SEQ ID NO: 100127 - protein, 21 aa, Severe acute respiratory syndrome coronavirus 2
DILSRLDKVEAEVQIDRLITG

SEQ ID NO: 100128 - protein, 21 aa, Severe acute respiratory syndrome coronavirus 2
ILSRLDKVEAEVQIDRLITGR

SEQ ID NO: 100129 - protein, 21 aa, Severe acute respiratory syndrome coronavirus 2
LSRLDKVEAEVQIDRLITGRL

SEQ ID NO: 100130 - protein, 21 aa, Severe acute respiratory syndrome coronavirus 2
SRLDKVEAEVQIDRLITGRLQ

SEQ ID NO: 100131 - protein, 21 aa, Severe acute respiratory syndrome coronavirus 2
RLDKVEAEVQIDRLITGRLQS

SEQ ID NO: 100132 - protein, 21 aa, Severe acute respiratory syndrome coronavirus 2
LDKVEAEVQIDRLITGRLQSL

SEQ ID NO: 100133 - protein, 21 aa, Severe acute respiratory syndrome coronavirus 2
DKVEAEVQIDRLITGRLQSLQ

SEQ ID NO: 100134 - protein, 21 aa, Severe acute respiratory syndrome coronavirus 2
KVEAEVQIDRLITGRLQSLQT

SEQ ID NO: 100135 - protein, 21 aa, Severe acute respiratory syndrome coronavirus 2
VEAEVQIDRLITGRLQSLQTY

SEQ ID NO: 100136 - protein, 21 aa, Severe acute respiratory syndrome coronavirus 2
EAEVQIDRLITGRLQSLQTYV

SEQ ID NO: 100137 - protein, 21 aa, Severe acute respiratory syndrome coronavirus 2
AEVQIDRLITGRLQSLQTYVT

SEQ ID NO: 100138 - protein, 21 aa, Severe acute respiratory syndrome coronavirus 2
EVQIDRLITGRLQSLQTYVTQ

SEQ ID NO: 100139 - protein, 21 aa, Severe acute respiratory syndrome coronavirus 2
VQIDRLITGRLQSLQTYVTQQ

SEQ ID NO: 100140 - protein, 21 aa, Severe acute respiratory syndrome coronavirus 2
QIDRLITGRLQSLQTYVTQQL

SEQ ID NO: 100141 - protein, 21 aa, Severe acute respiratory syndrome coronavirus 2
IDRLITGRLQSLQTYVTQQLI

SEQ ID NO: 100142 - protein, 21 aa, Severe acute respiratory syndrome coronavirus 2
DRLITGRLQSLQTYVTQQLIR

SEQ ID NO: 100143 - protein, 21 aa, Severe acute respiratory syndrome coronavirus 2
RLITGRLQSLQTYVTQQLIRA

SEQ ID NO: 100144 - protein, 21 aa, Severe acute respiratory syndrome coronavirus 2
LITGRLQSLQTYVTQQLIRAA

SEQ ID NO: 100145 - protein, 21 aa, Severe acute respiratory syndrome coronavirus 2
ITGRLQSLQTYVTQQLIRAAE

SEQ ID NO: 100146 - protein, 21 aa, Severe acute respiratory syndrome coronavirus 2
TGRLQSLQTYVTQQLIRAAEI

SEQ ID NO: 100147 - protein, 21 aa, Severe acute respiratory syndrome coronavirus 2
GRLQSLQTYVTQQLIRAAEIR

SEQ ID NO: 100148 - protein, 21 aa, Severe acute respiratory syndrome coronavirus 2
KMSECVLGQSKRVDFCGKGYH

SEQ ID NO: 100149 - protein, 21 aa, Severe acute respiratory syndrome coronavirus 2
MSECVLGQSKRVDFCGKGYHL

SEQ ID NO: 100150 - protein, 21 aa, Severe acute respiratory syndrome coronavirus 2
VLGQSKRVDFCGKGYHLMSFP

SEQ ID NO: 100151 - protein, 21 aa, Severe acute respiratory syndrome coronavirus 2
LGQSKRVDFCGKGYHLMSFPQ

SEQ ID NO: 100152 - protein, 21 aa, Severe acute respiratory syndrome coronavirus 2
GQSKRVDFCGKGYHLMSFPQS

SEQ ID NO: 100153 - protein, 21 aa, Severe acute respiratory syndrome coronavirus 2
QSKRVDFCGKGYHLMSFPQSA

SEQ ID NO: 100154 - protein, 21 aa, Severe acute respiratory syndrome coronavirus 2
SKRVDFCGKGYHLMSFPQSAP

SEQ ID NO: 100155 - protein, 21 aa, Severe acute respiratory syndrome coronavirus 2
KRVDFCGKGYHLMSFPQSAPH

SEQ ID NO: 100156 - protein, 21 aa, Severe acute respiratory syndrome coronavirus 2
RVDFCGKGYHLMSFPQSAPHG

SEQ ID NO: 100157 - protein, 21 aa, Severe acute respiratory syndrome coronavirus 2
VDFCGKGYHLMSFPQSAPHGV

SEQ ID NO: 100158 - protein, 21 aa, Severe acute respiratory syndrome coronavirus 2
DFCGKGYHLMSFPQSAPHGVV

SEQ ID NO: 100159 - protein, 21 aa, Severe acute respiratory syndrome coronavirus 2
FCGKGYHLMSFPQSAPHGVVF

SEQ ID NO: 100160 - protein, 21 aa, Severe acute respiratory syndrome coronavirus 2
CGKGYHLMSFPQSAPHGVVFL

SEQ ID NO: 100161 - protein, 21 aa, Severe acute respiratory syndrome coronavirus 2
GKGYHLMSFPQSAPHGVVFLH

SEQ ID NO: 100162 - protein, 21 aa, Severe acute respiratory syndrome coronavirus 2
KGYHLMSFPQSAPHGVVFLHV

SEQ ID NO: 100163 - protein, 21 aa, Severe acute respiratory syndrome coronavirus 2
GYHLMSFPQSAPHGVVFLHVT

SEQ ID NO: 100164 - protein, 21 aa, Severe acute respiratory syndrome coronavirus 2
YHLMSFPQSAPHGVVFLHVTY

SEQ ID NO: 100165 - protein, 21 aa, Severe acute respiratory syndrome coronavirus 2
HLMSFPQSAPHGVVFLHVTYV

SEQ ID NO: 100166 - protein, 21 aa, Severe acute respiratory syndrome coronavirus 2
LMSFPQSAPHGVVFLHVTYVP

SEQ ID NO: 100167 - protein, 21 aa, Severe acute respiratory syndrome coronavirus 2
MSFPQSAPHGVVFLHVTYVPA

SEQ ID NO: 100168 - protein, 21 aa, Severe acute respiratory syndrome coronavirus 2
SFPQSAPHGVVFLHVTYVPAQ

SEQ ID NO: 100169 - protein, 21 aa, Severe acute respiratory syndrome coronavirus 2
FPQSAPHGVVFLHVTYVPAQE

SEQ ID NO: 100170 - protein, 21 aa, Severe acute respiratory syndrome coronavirus 2
PQSAPHGVVFLHVTYVPAQEK

SEQ ID NO: 100171 - protein, 22 aa, Severe acute respiratory syndrome coronavirus 2
KNLREFVFKNIDGYFKIYSKHT

SEQ ID NO: 100172 - protein, 22 aa, Severe acute respiratory syndrome coronavirus 2
NLREFVFKNIDGYFKIYSKHTP

SEQ ID NO: 100173 - protein, 22 aa, Severe acute respiratory syndrome coronavirus 2
LREFVFKNIDGYFKIYSKHTPI

SEQ ID NO: 100174 - protein, 22 aa, Severe acute respiratory syndrome coronavirus 2
REFVFKNIDGYFKIYSKHTPIN

SEQ ID NO: 100175 - protein, 22 aa, Severe acute respiratory syndrome coronavirus 2
EFVFKNIDGYFKIYSKHTPINL

SEQ ID NO: 100176 - protein, 22 aa, Severe acute respiratory syndrome coronavirus 2
FVFKNIDGYFKIYSKHTPINLV

SEQ ID NO: 100177 - protein, 22 aa, Severe acute respiratory syndrome coronavirus 2
VFKNIDGYFKIYSKHTPINLVR

SEQ ID NO: 100178 - protein, 22 aa, Severe acute respiratory syndrome coronavirus 2
GTITDAVDCALDPLSETKCTLK

SEQ ID NO: 100179 - protein, 22 aa, Severe acute respiratory syndrome coronavirus 2
TITDAVDCALDPLSETKCTLKS

SEQ ID NO: 100180 - protein, 22 aa, Severe acute respiratory syndrome coronavirus 2
TRFASVYAWNRKRISNCVADYS

SEQ ID NO: 100181 - protein, 22 aa, Severe acute respiratory syndrome coronavirus 2
KLNDLCFTNVYADSFVIRGDEV

SEQ ID NO: 100182 - protein, 22 aa, Severe acute respiratory syndrome coronavirus 2
LNDLCFTNVYADSFVIRGDEVR

SEQ ID NO: 100183 - protein, 22 aa, Severe acute respiratory syndrome coronavirus 2
NDLCFTNVYADSFVIRGDEVRQ

SEQ ID NO: 100184 - protein, 22 aa, Severe acute respiratory syndrome coronavirus 2
DLCFTNVYADSFVIRGDEVRQI

SEQ ID NO: 100185 - protein, 22 aa, Severe acute respiratory syndrome coronavirus 2
LCFTNVYADSFVIRGDEVRQIA

SEQ ID NO: 100186 - protein, 22 aa, Severe acute respiratory syndrome coronavirus 2
CFTNVYADSFVIRGDEVRQIAP

SEQ ID NO: 100187 - protein, 22 aa, Severe acute respiratory syndrome coronavirus 2
FTNVYADSFVIRGDEVRQIAPG

SEQ ID NO: 100188 - protein, 22 aa, Severe acute respiratory syndrome coronavirus 2
RGDEVRQIAPGQTGKIADYNYK

SEQ ID NO: 100189 - protein, 22 aa, Severe acute respiratory syndrome coronavirus 2
GDEVRQIAPGQTGKIADYNYKL

SEQ ID NO: 100190 - protein, 22 aa, Severe acute respiratory syndrome coronavirus 2
DEVRQIAPGQTGKIADYNYKLP

SEQ ID NO: 100191 - protein, 22 aa, Severe acute respiratory syndrome coronavirus 2
EVRQIAPGQTGKIADYNYKLPD

SEQ ID NO: 100192 - protein, 22 aa, Severe acute respiratory syndrome coronavirus 2
VRQIAPGQTGKIADYNYKLPDD

SEQ ID NO: 100193 - protein, 22 aa, Severe acute respiratory syndrome coronavirus 2
RQIAPGQTGKIADYNYKLPDDF

SEQ ID NO: 100194 - protein, 22 aa, Severe acute respiratory syndrome coronavirus 2
IADYNYKLPDDFTGCVIAWNSN

SEQ ID NO: 100195 - protein, 22 aa, Severe acute respiratory syndrome coronavirus 2
ADYNYKLPDDFTGCVIAWNSNN

SEQ ID NO: 100196 - protein, 22 aa, Severe acute respiratory syndrome coronavirus 2
DYNYKLPDDFTGCVIAWNSNNL

SEQ ID NO: 100197 - protein, 22 aa, Severe acute respiratory syndrome coronavirus 2
YNYKLPDDFTGCVIAWNSNNLD

SEQ ID NO: 100198 - protein, 22 aa, Severe acute respiratory syndrome coronavirus 2
NYKLPDDFTGCVIAWNSNNLDS

SEQ ID NO: 100199 - protein, 22 aa, Severe acute respiratory syndrome coronavirus 2
YKLPDDFTGCVIAWNSNNLDSK

SEQ ID NO: 100200 - protein, 22 aa, Severe acute respiratory syndrome coronavirus 2
KLPDDFTGCVIAWNSNNLDSKV

SEQ ID NO: 100201 - protein, 22 aa, Severe acute respiratory syndrome coronavirus 2
LPDDFTGCVIAWNSNNLDSKVG

SEQ ID NO: 100202 - protein, 22 aa, Severe acute respiratory syndrome coronavirus 2
PDDFTGCVIAWNSNNLDSKVGG

SEQ ID NO: 100203 - protein, 22 aa, Severe acute respiratory syndrome coronavirus 2
DDFTGCVIAWNSNNLDSKVGGN

SEQ ID NO: 100204 - protein, 22 aa, Severe acute respiratory syndrome coronavirus 2
DFTGCVIAWNSNNLDSKVGGNY

SEQ ID NO: 100205 - protein, 22 aa, Severe acute respiratory syndrome coronavirus 2
FTGCVIAWNSNNLDSKVGGNYN

SEQ ID NO: 100206 - protein, 22 aa, Severe acute respiratory syndrome coronavirus 2
TGCVIAWNSNNLDSKVGGNYNY

SEQ ID NO: 100207 - protein, 22 aa, Severe acute respiratory syndrome coronavirus 2
GCVIAWNSNNLDSKVGGNYNYL

SEQ ID NO: 100208 - protein, 22 aa, Severe acute respiratory syndrome coronavirus 2
CVIAWNSNNLDSKVGGNYNYLY

SEQ ID NO: 100209 - protein, 22 aa, Severe acute respiratory syndrome coronavirus 2
VIAWNSNNLDSKVGGNYNYLYR

SEQ ID NO: 100210 - protein, 22 aa, Severe acute respiratory syndrome coronavirus 2
IAWNSNNLDSKVGGNYNYLYRL

SEQ ID NO: 100211 - protein, 22 aa, Severe acute respiratory syndrome coronavirus 2
AWNSNNLDSKVGGNYNYLYRLF

SEQ ID NO: 100212 - protein, 22 aa, Severe acute respiratory syndrome coronavirus 2
WNSNNLDSKVGGNYNYLYRLFR

SEQ ID NO: 100213 - protein, 22 aa, Severe acute respiratory syndrome coronavirus 2
NSNNLDSKVGGNYNYLYRLFRK

SEQ ID NO: 100214 - protein, 22 aa, Severe acute respiratory syndrome coronavirus 2
SNNLDSKVGGNYNYLYRLFRKS

SEQ ID NO: 100215 - protein, 22 aa, Severe acute respiratory syndrome coronavirus 2
NNLDSKVGGNYNYLYRLFRKSN

SEQ ID NO: 100216 - protein, 22 aa, Severe acute respiratory syndrome coronavirus 2
NLDSKVGGNYNYLYRLFRKSNL

SEQ ID NO: 100217 - protein, 22 aa, Severe acute respiratory syndrome coronavirus 2
LDSKVGGNYNYLYRLFRKSNLK

SEQ ID NO: 100218 - protein, 22 aa, Severe acute respiratory syndrome coronavirus 2
DSKVGGNYNYLYRLFRKSNLKP

SEQ ID NO: 100219 - protein, 22 aa, Severe acute respiratory syndrome coronavirus 2
SKVGGNYNYLYRLFRKSNLKPF

SEQ ID NO: 100220 - protein, 22 aa, Severe acute respiratory syndrome coronavirus 2
KVGGNYNYLYRLFRKSNLKPFE

SEQ ID NO: 100221 - protein, 22 aa, Severe acute respiratory syndrome coronavirus 2
VGGNYNYLYRLFRKSNLKPFER

SEQ ID NO: 100222 - protein, 22 aa, Severe acute respiratory syndrome coronavirus 2
GGNYNYLYRLFRKSNLKPFERD

SEQ ID NO: 100223 - protein, 22 aa, Severe acute respiratory syndrome coronavirus 2
YGFQPTNGVGYQPYRVVVLSFE

SEQ ID NO: 100224 - protein, 22 aa, Severe acute respiratory syndrome coronavirus 2
GFQPTNGVGYQPYRVVVLSFEL

SEQ ID NO: 100225 - protein, 22 aa, Severe acute respiratory syndrome coronavirus 2
FQPTNGVGYQPYRVVVLSFELL

SEQ ID NO: 100226 - protein, 22 aa, Severe acute respiratory syndrome coronavirus 2
QPTNGVGYQPYRVVVLSFELLH

SEQ ID NO: 100227 - protein, 22 aa, Severe acute respiratory syndrome coronavirus 2
APATVCGPKKSTNLVKNKCVNF

SEQ ID NO: 100228 - protein, 22 aa, Severe acute respiratory syndrome coronavirus 2
PATVCGPKKSTNLVKNKCVNFN

SEQ ID NO: 100229 - protein, 22 aa, Severe acute respiratory syndrome coronavirus 2
ATVCGPKKSTNLVKNKCVNFNF

SEQ ID NO: 100230 - protein, 22 aa, Severe acute respiratory syndrome coronavirus 2
TVCGPKKSTNLVKNKCVNFNFN

SEQ ID NO: 100231 - protein, 22 aa, Severe acute respiratory syndrome coronavirus 2
VCGPKKSTNLVKNKCVNFNFNG

SEQ ID NO: 100232 - protein, 22 aa, Severe acute respiratory syndrome coronavirus 2
CGPKKSTNLVKNKCVNFNFNGL

SEQ ID NO: 100233 - protein, 22 aa, Severe acute respiratory syndrome coronavirus 2
GPKKSTNLVKNKCVNFNFNGLT

SEQ ID NO: 100234 - protein, 22 aa, Severe acute respiratory syndrome coronavirus 2
PKKSTNLVKNKCVNFNFNGLTG

SEQ ID NO: 100235 - protein, 22 aa, Severe acute respiratory syndrome coronavirus 2
KKSTNLVKNKCVNFNFNGLTGT

SEQ ID NO: 100236 - protein, 22 aa, Severe acute respiratory syndrome coronavirus 2
KSTNLVKNKCVNFNFNGLTGTG

SEQ ID NO: 100237 - protein, 22 aa, Severe acute respiratory syndrome coronavirus 2
STNLVKNKCVNFNFNGLTGTGV

SEQ ID NO: 100238 - protein, 22 aa, Severe acute respiratory syndrome coronavirus 2
TNLVKNKCVNFNFNGLTGTGVL

SEQ ID NO: 100239 - protein, 22 aa, Severe acute respiratory syndrome coronavirus 2
NLVKNKCVNFNFNGLTGTGVLT

SEQ ID NO: 100240 - protein, 22 aa, Severe acute respiratory syndrome coronavirus 2
LVKNKCVNFNFNGLTGTGVLTE

SEQ ID NO: 100241 - protein, 22 aa, Severe acute respiratory syndrome coronavirus 2
VKNKCVNFNFNGLTGTGVLTES

SEQ ID NO: 100242 - protein, 22 aa, Severe acute respiratory syndrome coronavirus 2
KNKCVNFNFNGLTGTGVLTESN

SEQ ID NO: 100243 - protein, 22 aa, Severe acute respiratory syndrome coronavirus 2
NKCVNFNFNGLTGTGVLTESNK

SEQ ID NO: 100244 - protein, 22 aa, Severe acute respiratory syndrome coronavirus 2
VRDPQTLEILDITPCSFGGVSV

SEQ ID NO: 100245 - protein, 22 aa, Severe acute respiratory syndrome coronavirus 2
RDPQTLEILDITPCSFGGVSVI

SEQ ID NO: 100246 - protein, 22 aa, Severe acute respiratory syndrome coronavirus 2
DPQTLEILDITPCSFGGVSVIT

SEQ ID NO: 100247 - protein, 22 aa, Severe acute respiratory syndrome coronavirus 2
PQTLEILDITPCSFGGVSVITP

SEQ ID NO: 100248 - protein, 22 aa, Severe acute respiratory syndrome coronavirus 2
QTLEILDITPCSFGGVSVITPG

SEQ ID NO: 100249 - protein, 22 aa, Severe acute respiratory syndrome coronavirus 2
TLEILDITPCSFGGVSVITPGT

SEQ ID NO: 100250 - protein, 22 aa, Severe acute respiratory syndrome coronavirus 2
QLTPTWRVYSTGSNVFQTRAGC

SEQ ID NO: 100251 - protein, 22 aa, Severe acute respiratory syndrome coronavirus 2
LTPTWRVYSTGSNVFQTRAGCL

SEQ ID NO: 100252 - protein, 22 aa, Severe acute respiratory syndrome coronavirus 2
TPTWRVYSTGSNVFQTRAGCLI

SEQ ID NO: 100253 - protein, 22 aa, Severe acute respiratory syndrome coronavirus 2
PTWRVYSTGSNVFQTRAGCLIG

SEQ ID NO: 100254 - protein, 22 aa, Severe acute respiratory syndrome coronavirus 2
TWRVYSTGSNVFQTRAGCLIGA

SEQ ID NO: 100255 - protein, 22 aa, Severe acute respiratory syndrome coronavirus 2
YICGDSTECSNLLLQYGSFCTQ

SEQ ID NO: 100256 - protein, 22 aa, Severe acute respiratory syndrome coronavirus 2
ICGDSTECSNLLLQYGSFCTQL

SEQ ID NO: 100257 - protein, 22 aa, Severe acute respiratory syndrome coronavirus 2
CGDSTECSNLLLQYGSFCTQLN

SEQ ID NO: 100258 - protein, 22 aa, Severe acute respiratory syndrome coronavirus 2
GWTFGAGAALQIPFAMQMAYRF

SEQ ID NO: 100259 - protein, 22 aa, Severe acute respiratory syndrome coronavirus 2
WTFGAGAALQIPFAMQMAYRFN

SEQ ID NO: 100260 - protein, 22 aa, Severe acute respiratory syndrome coronavirus 2
TFGAGAALQIPFAMQMAYRFNG

SEQ ID NO: 100261 - protein, 22 aa, Severe acute respiratory syndrome coronavirus 2
FGAGAALQIPFAMQMAYRFNGI

SEQ ID NO: 100262 - protein, 22 aa, Severe acute respiratory syndrome coronavirus 2
GAGAALQIPFAMQMAYRFNGIG

SEQ ID NO: 100263 - protein, 22 aa, Severe acute respiratory syndrome coronavirus 2
AGAALQIPFAMQMAYRFNGIGV

SEQ ID NO: 100264 - protein, 22 aa, Severe acute respiratory syndrome coronavirus 2
GAALQIPFAMQMAYRFNGIGVT

SEQ ID NO: 100265 - protein, 22 aa, Severe acute respiratory syndrome coronavirus 2
AALQIPFAMQMAYRFNGIGVTQ

SEQ ID NO: 100266 - protein, 22 aa, Severe acute respiratory syndrome coronavirus 2
ALQIPFAMQMAYRFNGIGVTQN

SEQ ID NO: 100267 - protein, 22 aa, Severe acute respiratory syndrome coronavirus 2
LQIPFAMQMAYRFNGIGVTQNV

SEQ ID NO: 100268 - protein, 22 aa, Severe acute respiratory syndrome coronavirus 2
QIPFAMQMAYRFNGIGVTQNVL

SEQ ID NO: 100269 - protein, 22 aa, Severe acute respiratory syndrome coronavirus 2
IPFAMQMAYRFNGIGVTQNVLY

SEQ ID NO: 100270 - protein, 22 aa, Severe acute respiratory syndrome coronavirus 2
PFAMQMAYRFNGIGVTQNVLYE

SEQ ID NO: 100271 - protein, 22 aa, Severe acute respiratory syndrome coronavirus 2
FAMQMAYRFNGIGVTQNVLYEN

SEQ ID NO: 100272 - protein, 22 aa, Severe acute respiratory syndrome coronavirus 2
AMQMAYRFNGIGVTQNVLYENQ

SEQ ID NO: 100273 - protein, 22 aa, Severe acute respiratory syndrome coronavirus 2
MQMAYRFNGIGVTQNVLYENQK

SEQ ID NO: 100274 - protein, 22 aa, Severe acute respiratory syndrome coronavirus 2
QMAYRFNGIGVTQNVLYENQKL

SEQ ID NO: 100275 - protein, 22 aa, Severe acute respiratory syndrome coronavirus 2
MAYRFNGIGVTQNVLYENQKLI

SEQ ID NO: 100276 - protein, 22 aa, Severe acute respiratory syndrome coronavirus 2
AYRFNGIGVTQNVLYENQKLIA

SEQ ID NO: 100277 - protein, 22 aa, Severe acute respiratory syndrome coronavirus 2
YRFNGIGVTQNVLYENQKLIAN

SEQ ID NO: 100278 - protein, 22 aa, Severe acute respiratory syndrome coronavirus 2
RFNGIGVTQNVLYENQKLIANQ

SEQ ID NO: 100279 - protein, 22 aa, Severe acute respiratory syndrome coronavirus 2
FNGIGVTQNVLYENQKLIANQF

SEQ ID NO: 100280 - protein, 22 aa, Severe acute respiratory syndrome coronavirus 2
NGIGVTQNVLYENQKLIANQFN

SEQ ID NO: 100281 - protein, 22 aa, Severe acute respiratory syndrome coronavirus 2
LVKQLSSNFGAISSVLNDILSR

SEQ ID NO: 100282 - protein, 22 aa, Severe acute respiratory syndrome coronavirus 2
VKQLSSNFGAISSVLNDILSRL

SEQ ID NO: 100283 - protein, 22 aa, Severe acute respiratory syndrome coronavirus 2
KQLSSNFGAISSVLNDILSRLD

SEQ ID NO: 100284 - protein, 22 aa, Severe acute respiratory syndrome coronavirus 2
QLSSNFGAISSVLNDILSRLDK

SEQ ID NO: 100285 - protein, 22 aa, Severe acute respiratory syndrome coronavirus 2
LSSNFGAISSVLNDILSRLDKV

SEQ ID NO: 100286 - protein, 22 aa, Severe acute respiratory syndrome coronavirus 2
SSNFGAISSVLNDILSRLDKVE

SEQ ID NO: 100287 - protein, 22 aa, Severe acute respiratory syndrome coronavirus 2
SNFGAISSVLNDILSRLDKVEA

SEQ ID NO: 100288 - protein, 22 aa, Severe acute respiratory syndrome coronavirus 2
NFGAISSVLNDILSRLDKVEAE

SEQ ID NO: 100289 - protein, 22 aa, Severe acute respiratory syndrome coronavirus 2
FGAISSVLNDILSRLDKVEAEV

SEQ ID NO: 100290 - protein, 22 aa, Severe acute respiratory syndrome coronavirus 2
GAISSVLNDILSRLDKVEAEVQ

SEQ ID NO: 100291 - protein, 22 aa, Severe acute respiratory syndrome coronavirus 2
AISSVLNDILSRLDKVEAEVQI

SEQ ID NO: 100292 - protein, 22 aa, Severe acute respiratory syndrome coronavirus 2
ISSVLNDILSRLDKVEAEVQID

SEQ ID NO: 100293 - protein, 22 aa, Severe acute respiratory syndrome coronavirus 2
SSVLNDILSRLDKVEAEVQIDR

SEQ ID NO: 100294 - protein, 22 aa, Severe acute respiratory syndrome coronavirus 2
SVLNDILSRLDKVEAEVQIDRL

SEQ ID NO: 100295 - protein, 22 aa, Severe acute respiratory syndrome coronavirus 2
VLNDILSRLDKVEAEVQIDRLI

SEQ ID NO: 100296 - protein, 22 aa, Severe acute respiratory syndrome coronavirus 2
LNDILSRLDKVEAEVQIDRLIT

SEQ ID NO: 100297 - protein, 22 aa, Severe acute respiratory syndrome coronavirus 2
NDILSRLDKVEAEVQIDRLITG

SEQ ID NO: 100298 - protein, 22 aa, Severe acute respiratory syndrome coronavirus 2
DILSRLDKVEAEVQIDRLITGR

SEQ ID NO: 100299 - protein, 22 aa, Severe acute respiratory syndrome coronavirus 2
ILSRLDKVEAEVQIDRLITGRL

SEQ ID NO: 100300 - protein, 22 aa, Severe acute respiratory syndrome coronavirus 2
LSRLDKVEAEVQIDRLITGRLQ

SEQ ID NO: 100301 - protein, 22 aa, Severe acute respiratory syndrome coronavirus 2
SRLDKVEAEVQIDRLITGRLQS

SEQ ID NO: 100302 - protein, 22 aa, Severe acute respiratory syndrome coronavirus 2
RLDKVEAEVQIDRLITGRLQSL

SEQ ID NO: 100303 - protein, 22 aa, Severe acute respiratory syndrome coronavirus 2
LDKVEAEVQIDRLITGRLQSLQ

SEQ ID NO: 100304 - protein, 22 aa, Severe acute respiratory syndrome coronavirus 2
DKVEAEVQIDRLITGRLQSLQT

SEQ ID NO: 100305 - protein, 22 aa, Severe acute respiratory syndrome coronavirus 2
KVEAEVQIDRLITGRLQSLQTY

SEQ ID NO: 100306 - protein, 22 aa, Severe acute respiratory syndrome coronavirus 2
VEAEVQIDRLITGRLQSLQTYV

SEQ ID NO: 100307 - protein, 22 aa, Severe acute respiratory syndrome coronavirus 2
EAEVQIDRLITGRLQSLQTYVT

SEQ ID NO: 100308 - protein, 22 aa, Severe acute respiratory syndrome coronavirus 2
AEVQIDRLITGRLQSLQTYVTQ

SEQ ID NO: 100309 - protein, 22 aa, Severe acute respiratory syndrome coronavirus 2
EVQIDRLITGRLQSLQTYVTQQ

SEQ ID NO: 100310 - protein, 22 aa, Severe acute respiratory syndrome coronavirus 2
VQIDRLITGRLQSLQTYVTQQL

SEQ ID NO: 100311 - protein, 22 aa, Severe acute respiratory syndrome coronavirus 2
QIDRLITGRLQSLQTYVTQQLI

SEQ ID NO: 100312 - protein, 22 aa, Severe acute respiratory syndrome coronavirus 2
IDRLITGRLQSLQTYVTQQLIR

SEQ ID NO: 100313 - protein, 22 aa, Severe acute respiratory syndrome coronavirus 2
DRLITGRLQSLQTYVTQQLIRA

SEQ ID NO: 100314 - protein, 22 aa, Severe acute respiratory syndrome coronavirus 2
RLITGRLQSLQTYVTQQLIRAA

SEQ ID NO: 100315 - protein, 22 aa, Severe acute respiratory syndrome coronavirus 2
LITGRLQSLQTYVTQQLIRAAE

SEQ ID NO: 100316 - protein, 22 aa, Severe acute respiratory syndrome coronavirus 2
ITGRLQSLQTYVTQQLIRAAEI

SEQ ID NO: 100317 - protein, 22 aa, Severe acute respiratory syndrome coronavirus 2
TGRLQSLQTYVTQQLIRAAEIR

SEQ ID NO: 100318 - protein, 22 aa, Severe acute respiratory syndrome coronavirus 2
KMSECVLGQSKRVDFCGKGYHL

SEQ ID NO: 100319 - protein, 22 aa, Severe acute respiratory syndrome coronavirus 2
MSECVLGQSKRVDFCGKGYHLM

SEQ ID NO: 100320 - protein, 22 aa, Severe acute respiratory syndrome coronavirus 2
CVLGQSKRVDFCGKGYHLMSFP

SEQ ID NO: 100321 - protein, 22 aa, Severe acute respiratory syndrome coronavirus 2
VLGQSKRVDFCGKGYHLMSFPQ

SEQ ID NO: 100322 - protein, 22 aa, Severe acute respiratory syndrome coronavirus 2
LGQSKRVDFCGKGYHLMSFPQS

SEQ ID NO: 100323 - protein, 22 aa, Severe acute respiratory syndrome coronavirus 2
GQSKRVDFCGKGYHLMSFPQSA

SEQ ID NO: 100324 - protein, 22 aa, Severe acute respiratory syndrome coronavirus 2
QSKRVDFCGKGYHLMSFPQSAP

SEQ ID NO: 100325 - protein, 22 aa, Severe acute respiratory syndrome coronavirus 2
SKRVDFCGKGYHLMSFPQSAPH

SEQ ID NO: 100326 - protein, 22 aa, Severe acute respiratory syndrome coronavirus 2
KRVDFCGKGYHLMSFPQSAPHG

SEQ ID NO: 100327 - protein, 22 aa, Severe acute respiratory syndrome coronavirus 2
RVDFCGKGYHLMSFPQSAPHGV

SEQ ID NO: 100328 - protein, 22 aa, Severe acute respiratory syndrome coronavirus 2
VDFCGKGYHLMSFPQSAPHGVV

SEQ ID NO: 100329 - protein, 22 aa, Severe acute respiratory syndrome coronavirus 2
DFCGKGYHLMSFPQSAPHGVVF

SEQ ID NO: 100330 - protein, 22 aa, Severe acute respiratory syndrome coronavirus 2
FCGKGYHLMSFPQSAPHGVVFL

SEQ ID NO: 100331 - protein, 22 aa, Severe acute respiratory syndrome coronavirus 2
CGKGYHLMSFPQSAPHGVVFLH

SEQ ID NO: 100332 - protein, 22 aa, Severe acute respiratory syndrome coronavirus 2
GKGYHLMSFPQSAPHGVVFLHV

SEQ ID NO: 100333 - protein, 22 aa, Severe acute respiratory syndrome coronavirus 2
KGYHLMSFPQSAPHGVVFLHVT

SEQ ID NO: 100334 - protein, 22 aa, Severe acute respiratory syndrome coronavirus 2
GYHLMSFPQSAPHGVVFLHVTY

SEQ ID NO: 100335 - protein, 22 aa, Severe acute respiratory syndrome coronavirus 2
YHLMSFPQSAPHGVVFLHVTYV

SEQ ID NO: 100336 - protein, 22 aa, Severe acute respiratory syndrome coronavirus 2
HLMSFPQSAPHGVVFLHVTYVP

SEQ ID NO: 100337 - protein, 22 aa, Severe acute respiratory syndrome coronavirus 2
LMSFPQSAPHGVVFLHVTYVPA

SEQ ID NO: 100338 - protein, 22 aa, Severe acute respiratory syndrome coronavirus 2
MSFPQSAPHGVVFLHVTYVPAQ

SEQ ID NO: 100339 - protein, 22 aa, Severe acute respiratory syndrome coronavirus 2
SFPQSAPHGVVFLHVTYVPAQE

SEQ ID NO: 100340 - protein, 22 aa, Severe acute respiratory syndrome coronavirus 2
FPQSAPHGVVFLHVTYVPAQEK

SEQ ID NO: 100341 - protein, 23 aa, Severe acute respiratory syndrome coronavirus 2
KNLREFVFKNIDGYFKIYSKHTP

SEQ ID NO: 100342 - protein, 23 aa, Severe acute respiratory syndrome coronavirus 2
NLREFVFKNIDGYFKIYSKHTPI

SEQ ID NO: 100343 - protein, 23 aa, Severe acute respiratory syndrome coronavirus 2
LREFVFKNIDGYFKIYSKHTPIN

SEQ ID NO: 100344 - protein, 23 aa, Severe acute respiratory syndrome coronavirus 2
REFVFKNIDGYFKIYSKHTPINL

SEQ ID NO: 100345 - protein, 23 aa, Severe acute respiratory syndrome coronavirus 2
EFVFKNIDGYFKIYSKHTPINLV

SEQ ID NO: 100346 - protein, 23 aa, Severe acute respiratory syndrome coronavirus 2
FVFKNIDGYFKIYSKHTPINLVR

SEQ ID NO: 100347 - protein, 23 aa, Severe acute respiratory syndrome coronavirus 2
GTITDAVDCALDPLSETKCTLKS

SEQ ID NO: 100348 - protein, 23 aa, Severe acute respiratory syndrome coronavirus 2
TITDAVDCALDPLSETKCTLKSF

SEQ ID NO: 100349 - protein, 23 aa, Severe acute respiratory syndrome coronavirus 2
KLNDLCFTNVYADSFVIRGDEVR

SEQ ID NO: 100350 - protein, 23 aa, Severe acute respiratory syndrome coronavirus 2
LNDLCFTNVYADSFVIRGDEVRQ

SEQ ID NO: 100351 - protein, 23 aa, Severe acute respiratory syndrome coronavirus 2
NDLCFTNVYADSFVIRGDEVRQI

SEQ ID NO: 100352 - protein, 23 aa, Severe acute respiratory syndrome coronavirus 2
DLCFTNVYADSFVIRGDEVRQIA

SEQ ID NO: 100353 - protein, 23 aa, Severe acute respiratory syndrome coronavirus 2
LCFTNVYADSFVIRGDEVRQIAP

SEQ ID NO: 100354 - protein, 23 aa, Severe acute respiratory syndrome coronavirus 2
CFTNVYADSFVIRGDEVRQIAPG

SEQ ID NO: 100355 - protein, 23 aa, Severe acute respiratory syndrome coronavirus 2
RGDEVRQIAPGQTGKIADYNYKL

SEQ ID NO: 100356 - protein, 23 aa, Severe acute respiratory syndrome coronavirus 2
GDEVRQIAPGQTGKIADYNYKLP

SEQ ID NO: 100357 - protein, 23 aa, Severe acute respiratory syndrome coronavirus 2
DEVRQIAPGQTGKIADYNYKLPD

SEQ ID NO: 100358 - protein, 23 aa, Severe acute respiratory syndrome coronavirus 2
EVRQIAPGQTGKIADYNYKLPDD

SEQ ID NO: 100359 - protein, 23 aa, Severe acute respiratory syndrome coronavirus 2
VRQIAPGQTGKIADYNYKLPDDF

SEQ ID NO: 100360 - protein, 23 aa, Severe acute respiratory syndrome coronavirus 2
RQIAPGQTGKIADYNYKLPDDFT

SEQ ID NO: 100361 - protein, 23 aa, Severe acute respiratory syndrome coronavirus 2
GKIADYNYKLPDDFTGCVIAWNS

SEQ ID NO: 100362 - protein, 23 aa, Severe acute respiratory syndrome coronavirus 2
KIADYNYKLPDDFTGCVIAWNSN

SEQ ID NO: 100363 - protein, 23 aa, Severe acute respiratory syndrome coronavirus 2
IADYNYKLPDDFTGCVIAWNSNN

SEQ ID NO: 100364 - protein, 23 aa, Severe acute respiratory syndrome coronavirus 2
ADYNYKLPDDFTGCVIAWNSNNL

SEQ ID NO: 100365 - protein, 23 aa, Severe acute respiratory syndrome coronavirus 2
DYNYKLPDDFTGCVIAWNSNNLD

SEQ ID NO: 100366 - protein, 23 aa, Severe acute respiratory syndrome coronavirus 2
YNYKLPDDFTGCVIAWNSNNLDS

SEQ ID NO: 100367 - protein, 23 aa, Severe acute respiratory syndrome coronavirus 2
NYKLPDDFTGCVIAWNSNNLDSK

SEQ ID NO: 100368 - protein, 23 aa, Severe acute respiratory syndrome coronavirus 2
YKLPDDFTGCVIAWNSNNLDSKV

SEQ ID NO: 100369 - protein, 23 aa, Severe acute respiratory syndrome coronavirus 2
KLPDDFTGCVIAWNSNNLDSKVG

SEQ ID NO: 100370 - protein, 23 aa, Severe acute respiratory syndrome coronavirus 2
LPDDFTGCVIAWNSNNLDSKVGG

SEQ ID NO: 100371 - protein, 23 aa, Severe acute respiratory syndrome coronavirus 2
PDDFTGCVIAWNSNNLDSKVGGN

SEQ ID NO: 100372 - protein, 23 aa, Severe acute respiratory syndrome coronavirus 2
DDFTGCVIAWNSNNLDSKVGGNY

SEQ ID NO: 100373 - protein, 23 aa, Severe acute respiratory syndrome coronavirus 2
DFTGCVIAWNSNNLDSKVGGNYN

SEQ ID NO: 100374 - protein, 23 aa, Severe acute respiratory syndrome coronavirus 2
FTGCVIAWNSNNLDSKVGGNYNY

SEQ ID NO: 100375 - protein, 23 aa, Severe acute respiratory syndrome coronavirus 2
TGCVIAWNSNNLDSKVGGNYNYL

SEQ ID NO: 100376 - protein, 23 aa, Severe acute respiratory syndrome coronavirus 2
GCVIAWNSNNLDSKVGGNYNYLY

SEQ ID NO: 100377 - protein, 23 aa, Severe acute respiratory syndrome coronavirus 2
CVIAWNSNNLDSKVGGNYNYLYR

SEQ ID NO: 100378 - protein, 23 aa, Severe acute respiratory syndrome coronavirus 2
VIAWNSNNLDSKVGGNYNYLYRL

SEQ ID NO: 100379 - protein, 23 aa, Severe acute respiratory syndrome coronavirus 2
IAWNSNNLDSKVGGNYNYLYRLF

SEQ ID NO: 100380 - protein, 23 aa, Severe acute respiratory syndrome coronavirus 2
AWNSNNLDSKVGGNYNYLYRLFR

SEQ ID NO: 100381 - protein, 23 aa, Severe acute respiratory syndrome coronavirus 2
WNSNNLDSKVGGNYNYLYRLFRK

SEQ ID NO: 100382 - protein, 23 aa, Severe acute respiratory syndrome coronavirus 2
NSNNLDSKVGGNYNYLYRLFRKS

SEQ ID NO: 100383 - protein, 23 aa, Severe acute respiratory syndrome coronavirus 2
SNNLDSKVGGNYNYLYRLFRKSN

SEQ ID NO: 100384 - protein, 23 aa, Severe acute respiratory syndrome coronavirus 2
NNLDSKVGGNYNYLYRLFRKSNL

SEQ ID NO: 100385 - protein, 23 aa, Severe acute respiratory syndrome coronavirus 2
NLDSKVGGNYNYLYRLFRKSNLK

SEQ ID NO: 100386 - protein, 23 aa, Severe acute respiratory syndrome coronavirus 2
LDSKVGGNYNYLYRLFRKSNLKP

SEQ ID NO: 100387 - protein, 23 aa, Severe acute respiratory syndrome coronavirus 2
DSKVGGNYNYLYRLFRKSNLKPF

SEQ ID NO: 100388 - protein, 23 aa, Severe acute respiratory syndrome coronavirus 2
SKVGGNYNYLYRLFRKSNLKPFE

SEQ ID NO: 100389 - protein, 23 aa, Severe acute respiratory syndrome coronavirus 2
KVGGNYNYLYRLFRKSNLKPFER

SEQ ID NO: 100390 - protein, 23 aa, Severe acute respiratory syndrome coronavirus 2
VGGNYNYLYRLFRKSNLKPFERD

SEQ ID NO: 100391 - protein, 23 aa, Severe acute respiratory syndrome coronavirus 2
YGFQPTNGVGYQPYRVVVLSFEL

SEQ ID NO: 100392 - protein, 23 aa, Severe acute respiratory syndrome coronavirus 2
GFQPTNGVGYQPYRVVVLSFELL

SEQ ID NO: 100393 - protein, 23 aa, Severe acute respiratory syndrome coronavirus 2
FQPTNGVGYQPYRVVVLSFELLH

SEQ ID NO: 100394 - protein, 23 aa, Severe acute respiratory syndrome coronavirus 2
APATVCGPKKSTNLVKNKCVNFN

SEQ ID NO: 100395 - protein, 23 aa, Severe acute respiratory syndrome coronavirus 2
PATVCGPKKSTNLVKNKCVNFNF

SEQ ID NO: 100396 - protein, 23 aa, Severe acute respiratory syndrome coronavirus 2
ATVCGPKKSTNLVKNKCVNFNFN

SEQ ID NO: 100397 - protein, 23 aa, Severe acute respiratory syndrome coronavirus 2
TVCGPKKSTNLVKNKCVNFNFNG

SEQ ID NO: 100398 - protein, 23 aa, Severe acute respiratory syndrome coronavirus 2
VCGPKKSTNLVKNKCVNFNFNGL

SEQ ID NO: 100399 - protein, 23 aa, Severe acute respiratory syndrome coronavirus 2
CGPKKSTNLVKNKCVNFNFNGLT

SEQ ID NO: 100400 - protein, 23 aa, Severe acute respiratory syndrome coronavirus 2
GPKKSTNLVKNKCVNFNFNGLTG

SEQ ID NO: 100401 - protein, 23 aa, Severe acute respiratory syndrome coronavirus 2
PKKSTNLVKNKCVNFNFNGLTGT

SEQ ID NO: 100402 - protein, 23 aa, Severe acute respiratory syndrome coronavirus 2
KKSTNLVKNKCVNFNFNGLTGTG

SEQ ID NO: 100403 - protein, 23 aa, Severe acute respiratory syndrome coronavirus 2
KSTNLVKNKCVNFNFNGLTGTGV

SEQ ID NO: 100404 - protein, 23 aa, Severe acute respiratory syndrome coronavirus 2
STNLVKNKCVNFNFNGLTGTGVL

SEQ ID NO: 100405 - protein, 23 aa, Severe acute respiratory syndrome coronavirus 2
TNLVKNKCVNFNFNGLTGTGVLT

SEQ ID NO: 100406 - protein, 23 aa, Severe acute respiratory syndrome coronavirus 2
NLVKNKCVNFNFNGLTGTGVLTE

SEQ ID NO: 100407 - protein, 23 aa, Severe acute respiratory syndrome coronavirus 2
LVKNKCVNFNFNGLTGTGVLTES

SEQ ID NO: 100408 - protein, 23 aa, Severe acute respiratory syndrome coronavirus 2
VKNKCVNFNFNGLTGTGVLTESN

SEQ ID NO: 100409 - protein, 23 aa, Severe acute respiratory syndrome coronavirus 2
KNKCVNFNFNGLTGTGVLTESNK

SEQ ID NO: 100410 - protein, 23 aa, Severe acute respiratory syndrome coronavirus 2
VRDPQTLEILDITPCSFGGVSVI

SEQ ID NO: 100411 - protein, 23 aa, Severe acute respiratory syndrome coronavirus 2
RDPQTLEILDITPCSFGGVSVIT

SEQ ID NO: 100412 - protein, 23 aa, Severe acute respiratory syndrome coronavirus 2
DPQTLEILDITPCSFGGVSVITP

SEQ ID NO: 100413 - protein, 23 aa, Severe acute respiratory syndrome coronavirus 2
PQTLEILDITPCSFGGVSVITPG

SEQ ID NO: 100414 - protein, 23 aa, Severe acute respiratory syndrome coronavirus 2
QTLEILDITPCSFGGVSVITPGT

SEQ ID NO: 100415 - protein, 23 aa, Severe acute respiratory syndrome coronavirus 2
QLTPTWRVYSTGSNVFQTRAGCL

SEQ ID NO: 100416 - protein, 23 aa, Severe acute respiratory syndrome coronavirus 2
LTPTWRVYSTGSNVFQTRAGCLI

SEQ ID NO: 100417 - protein, 23 aa, Severe acute respiratory syndrome coronavirus 2
TPTWRVYSTGSNVFQTRAGCLIG

SEQ ID NO: 100418 - protein, 23 aa, Severe acute respiratory syndrome coronavirus 2
PTWRVYSTGSNVFQTRAGCLIGA

SEQ ID NO: 100419 - protein, 23 aa, Severe acute respiratory syndrome coronavirus 2
YICGDSTECSNLLLQYGSFCTQL

SEQ ID NO: 100420 - protein, 23 aa, Severe acute respiratory syndrome coronavirus 2
ICGDSTECSNLLLQYGSFCTQLN

SEQ ID NO: 100421 - protein, 23 aa, Severe acute respiratory syndrome coronavirus 2
GWTFGAGAALQIPFAMQMAYRFN

SEQ ID NO: 100422 - protein, 23 aa, Severe acute respiratory syndrome coronavirus 2
WTFGAGAALQIPFAMQMAYRFNG

SEQ ID NO: 100423 - protein, 23 aa, Severe acute respiratory syndrome coronavirus 2
TFGAGAALQIPFAMQMAYRFNGI

SEQ ID NO: 100424 - protein, 23 aa, Severe acute respiratory syndrome coronavirus 2
FGAGAALQIPFAMQMAYRFNGIG

SEQ ID NO: 100425 - protein, 23 aa, Severe acute respiratory syndrome coronavirus 2
GAGAALQIPFAMQMAYRFNGIGV

SEQ ID NO: 100426 - protein, 23 aa, Severe acute respiratory syndrome coronavirus 2
AGAALQIPFAMQMAYRFNGIGVT

SEQ ID NO: 100427 - protein, 23 aa, Severe acute respiratory syndrome coronavirus 2
GAALQIPFAMQMAYRFNGIGVTQ

SEQ ID NO: 100428 - protein, 23 aa, Severe acute respiratory syndrome coronavirus 2
AALQIPFAMQMAYRFNGIGVTQN

SEQ ID NO: 100429 - protein, 23 aa, Severe acute respiratory syndrome coronavirus 2
ALQIPFAMQMAYRFNGIGVTQNV

SEQ ID NO: 100430 - protein, 23 aa, Severe acute respiratory syndrome coronavirus 2
LQIPFAMQMAYRFNGIGVTQNVL

SEQ ID NO: 100431 - protein, 23 aa, Severe acute respiratory syndrome coronavirus 2
QIPFAMQMAYRFNGIGVTQNVLY

SEQ ID NO: 100432 - protein, 23 aa, Severe acute respiratory syndrome coronavirus 2
IPFAMQMAYRFNGIGVTQNVLYE

SEQ ID NO: 100433 - protein, 23 aa, Severe acute respiratory syndrome coronavirus 2
PFAMQMAYRFNGIGVTQNVLYEN

SEQ ID NO: 100434 - protein, 23 aa, Severe acute respiratory syndrome coronavirus 2
FAMQMAYRFNGIGVTQNVLYENQ

SEQ ID NO: 100435 - protein, 23 aa, Severe acute respiratory syndrome coronavirus 2
AMQMAYRFNGIGVTQNVLYENQK

SEQ ID NO: 100436 - protein, 23 aa, Severe acute respiratory syndrome coronavirus 2
MQMAYRFNGIGVTQNVLYENQKL

SEQ ID NO: 100437 - protein, 23 aa, Severe acute respiratory syndrome coronavirus 2
QMAYRFNGIGVTQNVLYENQKLI

SEQ ID NO: 100438 - protein, 23 aa, Severe acute respiratory syndrome coronavirus 2
MAYRFNGIGVTQNVLYENQKLIA

SEQ ID NO: 100439 - protein, 23 aa, Severe acute respiratory syndrome coronavirus 2
AYRFNGIGVTQNVLYENQKLIAN

SEQ ID NO: 100440 - protein, 23 aa, Severe acute respiratory syndrome coronavirus 2
YRFNGIGVTQNVLYENQKLIANQ

SEQ ID NO: 100441 - protein, 23 aa, Severe acute respiratory syndrome coronavirus 2
RFNGIGVTQNVLYENQKLIANQF

SEQ ID NO: 100442 - protein, 23 aa, Severe acute respiratory syndrome coronavirus 2
FNGIGVTQNVLYENQKLIANQFN

SEQ ID NO: 100443 - protein, 23 aa, Severe acute respiratory syndrome coronavirus 2
LVKQLSSNFGAISSVLNDILSRL

SEQ ID NO: 100444 - protein, 23 aa, Severe acute respiratory syndrome coronavirus 2
VKQLSSNFGAISSVLNDILSRLD

SEQ ID NO: 100445 - protein, 23 aa, Severe acute respiratory syndrome coronavirus 2
KQLSSNFGAISSVLNDILSRLDK

SEQ ID NO: 100446 - protein, 23 aa, Severe acute respiratory syndrome coronavirus 2
QLSSNFGAISSVLNDILSRLDKV

SEQ ID NO: 100447 - protein, 23 aa, Severe acute respiratory syndrome coronavirus 2
LSSNFGAISSVLNDILSRLDKVE

SEQ ID NO: 100448 - protein, 23 aa, Severe acute respiratory syndrome coronavirus 2
SSNFGAISSVLNDILSRLDKVEA

SEQ ID NO: 100449 - protein, 23 aa, Severe acute respiratory syndrome coronavirus 2
SNFGAISSVLNDILSRLDKVEAE

SEQ ID NO: 100450 - protein, 23 aa, Severe acute respiratory syndrome coronavirus 2
NFGAISSVLNDILSRLDKVEAEV

SEQ ID NO: 100451 - protein, 23 aa, Severe acute respiratory syndrome coronavirus 2
FGAISSVLNDILSRLDKVEAEVQ

SEQ ID NO: 100452 - protein, 23 aa, Severe acute respiratory syndrome coronavirus 2
GAISSVLNDILSRLDKVEAEVQI

SEQ ID NO: 100453 - protein, 23 aa, Severe acute respiratory syndrome coronavirus 2
AISSVLNDILSRLDKVEAEVQID

SEQ ID NO: 100454 - protein, 23 aa, Severe acute respiratory syndrome coronavirus 2
ISSVLNDILSRLDKVEAEVQIDR

SEQ ID NO: 100455 - protein, 23 aa, Severe acute respiratory syndrome coronavirus 2
SSVLNDILSRLDKVEAEVQIDRL

SEQ ID NO: 100456 - protein, 23 aa, Severe acute respiratory syndrome coronavirus 2
SVLNDILSRLDKVEAEVQIDRLI

SEQ ID NO: 100457 - protein, 23 aa, Severe acute respiratory syndrome coronavirus 2
VLNDILSRLDKVEAEVQIDRLIT

SEQ ID NO: 100458 - protein, 23 aa, Severe acute respiratory syndrome coronavirus 2
LNDILSRLDKVEAEVQIDRLITG

SEQ ID NO: 100459 - protein, 23 aa, Severe acute respiratory syndrome coronavirus 2
NDILSRLDKVEAEVQIDRLITGR

SEQ ID NO: 100460 - protein, 23 aa, Severe acute respiratory syndrome coronavirus 2
DILSRLDKVEAEVQIDRLITGRL

SEQ ID NO: 100461 - protein, 23 aa, Severe acute respiratory syndrome coronavirus 2
ILSRLDKVEAEVQIDRLITGRLQ

SEQ ID NO: 100462 - protein, 23 aa, Severe acute respiratory syndrome coronavirus 2
LSRLDKVEAEVQIDRLITGRLQS

SEQ ID NO: 100463 - protein, 23 aa, Severe acute respiratory syndrome coronavirus 2
SRLDKVEAEVQIDRLITGRLQSL

SEQ ID NO: 100464 - protein, 23 aa, Severe acute respiratory syndrome coronavirus 2
RLDKVEAEVQIDRLITGRLQSLQ

SEQ ID NO: 100465 - protein, 23 aa, Severe acute respiratory syndrome coronavirus 2
LDKVEAEVQIDRLITGRLQSLQT

SEQ ID NO: 100466 - protein, 23 aa, Severe acute respiratory syndrome coronavirus 2
DKVEAEVQIDRLITGRLQSLQTY

SEQ ID NO: 100467 - protein, 23 aa, Severe acute respiratory syndrome coronavirus 2
KVEAEVQIDRLITGRLQSLQTYV

SEQ ID NO: 100468 - protein, 23 aa, Severe acute respiratory syndrome coronavirus 2
VEAEVQIDRLITGRLQSLQTYVT

SEQ ID NO: 100469 - protein, 23 aa, Severe acute respiratory syndrome coronavirus 2
EAEVQIDRLITGRLQSLQTYVTQ

SEQ ID NO: 100470 - protein, 23 aa, Severe acute respiratory syndrome coronavirus 2
AEVQIDRLITGRLQSLQTYVTQQ

SEQ ID NO: 100471 - protein, 23 aa, Severe acute respiratory syndrome coronavirus 2
EVQIDRLITGRLQSLQTYVTQQL

SEQ ID NO: 100472 - protein, 23 aa, Severe acute respiratory syndrome coronavirus 2
VQIDRLITGRLQSLQTYVTQQLI

SEQ ID NO: 100473 - protein, 23 aa, Severe acute respiratory syndrome coronavirus 2
QIDRLITGRLQSLQTYVTQQLIR

SEQ ID NO: 100474 - protein, 23 aa, Severe acute respiratory syndrome coronavirus 2
IDRLITGRLQSLQTYVTQQLIRA

SEQ ID NO: 100475 - protein, 23 aa, Severe acute respiratory syndrome coronavirus 2
DRLITGRLQSLQTYVTQQLIRAA

SEQ ID NO: 100476 - protein, 23 aa, Severe acute respiratory syndrome coronavirus 2
RLITGRLQSLQTYVTQQLIRAAE

SEQ ID NO: 100477 - protein, 23 aa, Severe acute respiratory syndrome coronavirus 2
LITGRLQSLQTYVTQQLIRAAEI

SEQ ID NO: 100478 - protein, 23 aa, Severe acute respiratory syndrome coronavirus 2
ITGRLQSLQTYVTQQLIRAAEIR

SEQ ID NO: 100479 - protein, 23 aa, Severe acute respiratory syndrome coronavirus 2
KMSECVLGQSKRVDFCGKGYHLM

SEQ ID NO: 100480 - protein, 23 aa, Severe acute respiratory syndrome coronavirus 2
MSECVLGQSKRVDFCGKGYHLMS

SEQ ID NO: 100481 - protein, 23 aa, Severe acute respiratory syndrome coronavirus 2
SECVLGQSKRVDFCGKGYHLMSF

SEQ ID NO: 100482 - protein, 23 aa, Severe acute respiratory syndrome coronavirus 2
ECVLGQSKRVDFCGKGYHLMSFP

SEQ ID NO: 100483 - protein, 23 aa, Severe acute respiratory syndrome coronavirus 2
CVLGQSKRVDFCGKGYHLMSFPQ

SEQ ID NO: 100484 - protein, 23 aa, Severe acute respiratory syndrome coronavirus 2
VLGQSKRVDFCGKGYHLMSFPQS

SEQ ID NO: 100485 - protein, 23 aa, Severe acute respiratory syndrome coronavirus 2
LGQSKRVDFCGKGYHLMSFPQSA

SEQ ID NO: 100486 - protein, 23 aa, Severe acute respiratory syndrome coronavirus 2
GQSKRVDFCGKGYHLMSFPQSAP

SEQ ID NO: 100487 - protein, 23 aa, Severe acute respiratory syndrome coronavirus 2
QSKRVDFCGKGYHLMSFPQSAPH

SEQ ID NO: 100488 - protein, 23 aa, Severe acute respiratory syndrome coronavirus 2
SKRVDFCGKGYHLMSFPQSAPHG

SEQ ID NO: 100489 - protein, 23 aa, Severe acute respiratory syndrome coronavirus 2
KRVDFCGKGYHLMSFPQSAPHGV

SEQ ID NO: 100490 - protein, 23 aa, Severe acute respiratory syndrome coronavirus 2
RVDFCGKGYHLMSFPQSAPHGVV

SEQ ID NO: 100491 - protein, 23 aa, Severe acute respiratory syndrome coronavirus 2
VDFCGKGYHLMSFPQSAPHGVVF

SEQ ID NO: 100492 - protein, 23 aa, Severe acute respiratory syndrome coronavirus 2
DFCGKGYHLMSFPQSAPHGVVFL

SEQ ID NO: 100493 - protein, 23 aa, Severe acute respiratory syndrome coronavirus 2
FCGKGYHLMSFPQSAPHGVVFLH

SEQ ID NO: 100494 - protein, 23 aa, Severe acute respiratory syndrome coronavirus 2
CGKGYHLMSFPQSAPHGVVFLHV

SEQ ID NO: 100495 - protein, 23 aa, Severe acute respiratory syndrome coronavirus 2
GKGYHLMSFPQSAPHGVVFLHVT

SEQ ID NO: 100496 - protein, 23 aa, Severe acute respiratory syndrome coronavirus 2
KGYHLMSFPQSAPHGVVFLHVTY

SEQ ID NO: 100497 - protein, 23 aa, Severe acute respiratory syndrome coronavirus 2
GYHLMSFPQSAPHGVVFLHVTYV

SEQ ID NO: 100498 - protein, 23 aa, Severe acute respiratory syndrome coronavirus 2
YHLMSFPQSAPHGVVFLHVTYVP

SEQ ID NO: 100499 - protein, 23 aa, Severe acute respiratory syndrome coronavirus 2
HLMSFPQSAPHGVVFLHVTYVPA

SEQ ID NO: 100500 - protein, 23 aa, Severe acute respiratory syndrome coronavirus 2
LMSFPQSAPHGVVFLHVTYVPAQ

SEQ ID NO: 100501 - protein, 23 aa, Severe acute respiratory syndrome coronavirus 2
MSFPQSAPHGVVFLHVTYVPAQE

SEQ ID NO: 100502 - protein, 23 aa, Severe acute respiratory syndrome coronavirus 2
SFPQSAPHGVVFLHVTYVPAQEK

SEQ ID NO: 100503 - protein, 24 aa, Severe acute respiratory syndrome coronavirus 2
KNLREFVFKNIDGYFKIYSKHTPI

SEQ ID NO: 100504 - protein, 24 aa, Severe acute respiratory syndrome coronavirus 2
NLREFVFKNIDGYFKIYSKHTPIN

SEQ ID NO: 100505 - protein, 24 aa, Severe acute respiratory syndrome coronavirus 2
LREFVFKNIDGYFKIYSKHTPINL

SEQ ID NO: 100506 - protein, 24 aa, Severe acute respiratory syndrome coronavirus 2
REFVFKNIDGYFKIYSKHTPINLV

SEQ ID NO: 100507 - protein, 24 aa, Severe acute respiratory syndrome coronavirus 2
EFVFKNIDGYFKIYSKHTPINLVR

SEQ ID NO: 100508 - protein, 24 aa, Severe acute respiratory syndrome coronavirus 2
GTITDAVDCALDPLSETKCTLKSF

SEQ ID NO: 100509 - protein, 24 aa, Severe acute respiratory syndrome coronavirus 2
TITDAVDCALDPLSETKCTLKSFT

SEQ ID NO: 100510 - protein, 24 aa, Severe acute respiratory syndrome coronavirus 2
KLNDLCFTNVYADSFVIRGDEVRQ

SEQ ID NO: 100511 - protein, 24 aa, Severe acute respiratory syndrome coronavirus 2
LNDLCFTNVYADSFVIRGDEVRQI

SEQ ID NO: 100512 - protein, 24 aa, Severe acute respiratory syndrome coronavirus 2
NDLCFTNVYADSFVIRGDEVRQIA

SEQ ID NO: 100513 - protein, 24 aa, Severe acute respiratory syndrome coronavirus 2
DLCFTNVYADSFVIRGDEVRQIAP

SEQ ID NO: 100514 - protein, 24 aa, Severe acute respiratory syndrome coronavirus 2
LCFTNVYADSFVIRGDEVRQIAPG

SEQ ID NO: 100515 - protein, 24 aa, Severe acute respiratory syndrome coronavirus 2
RGDEVRQIAPGQTGKIADYNYKLP

SEQ ID NO: 100516 - protein, 24 aa, Severe acute respiratory syndrome coronavirus 2
GDEVRQIAPGQTGKIADYNYKLPD

SEQ ID NO: 100517 - protein, 24 aa, Severe acute respiratory syndrome coronavirus 2
DEVRQIAPGQTGKIADYNYKLPDD

SEQ ID NO: 100518 - protein, 24 aa, Severe acute respiratory syndrome coronavirus 2
EVRQIAPGQTGKIADYNYKLPDDF

SEQ ID NO: 100519 - protein, 24 aa, Severe acute respiratory syndrome coronavirus 2
VRQIAPGQTGKIADYNYKLPDDFT

SEQ ID NO: 100520 - protein, 24 aa, Severe acute respiratory syndrome coronavirus 2
RQIAPGQTGKIADYNYKLPDDFTG

SEQ ID NO: 100521 - protein, 24 aa, Severe acute respiratory syndrome coronavirus 2
TGKIADYNYKLPDDFTGCVIAWNS

SEQ ID NO: 100522 - protein, 24 aa, Severe acute respiratory syndrome coronavirus 2
GKIADYNYKLPDDFTGCVIAWNSN

SEQ ID NO: 100523 - protein, 24 aa, Severe acute respiratory syndrome coronavirus 2
KIADYNYKLPDDFTGCVIAWNSNN

SEQ ID NO: 100524 - protein, 24 aa, Severe acute respiratory syndrome coronavirus 2
IADYNYKLPDDFTGCVIAWNSNNL

SEQ ID NO: 100525 - protein, 24 aa, Severe acute respiratory syndrome coronavirus 2
ADYNYKLPDDFTGCVIAWNSNNLD

SEQ ID NO: 100526 - protein, 24 aa, Severe acute respiratory syndrome coronavirus 2
DYNYKLPDDFTGCVIAWNSNNLDS

SEQ ID NO: 100527 - protein, 24 aa, Severe acute respiratory syndrome coronavirus 2
YNYKLPDDFTGCVIAWNSNNLDSK

SEQ ID NO: 100528 - protein, 24 aa, Severe acute respiratory syndrome coronavirus 2
NYKLPDDFTGCVIAWNSNNLDSKV

SEQ ID NO: 100529 - protein, 24 aa, Severe acute respiratory syndrome coronavirus 2
YKLPDDFTGCVIAWNSNNLDSKVG

SEQ ID NO: 100530 - protein, 24 aa, Severe acute respiratory syndrome coronavirus 2
KLPDDFTGCVIAWNSNNLDSKVGG

SEQ ID NO: 100531 - protein, 24 aa, Severe acute respiratory syndrome coronavirus 2
LPDDFTGCVIAWNSNNLDSKVGGN

SEQ ID NO: 100532 - protein, 24 aa, Severe acute respiratory syndrome coronavirus 2
PDDFTGCVIAWNSNNLDSKVGGNY

SEQ ID NO: 100533 - protein, 24 aa, Severe acute respiratory syndrome coronavirus 2
DDFTGCVIAWNSNNLDSKVGGNYN

SEQ ID NO: 100534 - protein, 24 aa, Severe acute respiratory syndrome coronavirus 2
DFTGCVIAWNSNNLDSKVGGNYNY

SEQ ID NO: 100535 - protein, 24 aa, Severe acute respiratory syndrome coronavirus 2
FTGCVIAWNSNNLDSKVGGNYNYL

SEQ ID NO: 100536 - protein, 24 aa, Severe acute respiratory syndrome coronavirus 2
TGCVIAWNSNNLDSKVGGNYNYLY

SEQ ID NO: 100537 - protein, 24 aa, Severe acute respiratory syndrome coronavirus 2
GCVIAWNSNNLDSKVGGNYNYLYR

SEQ ID NO: 100538 - protein, 24 aa, Severe acute respiratory syndrome coronavirus 2
CVIAWNSNNLDSKVGGNYNYLYRL

SEQ ID NO: 100539 - protein, 24 aa, Severe acute respiratory syndrome coronavirus 2
VIAWNSNNLDSKVGGNYNYLYRLF

SEQ ID NO: 100540 - protein, 24 aa, Severe acute respiratory syndrome coronavirus 2
IAWNSNNLDSKVGGNYNYLYRLFR

SEQ ID NO: 100541 - protein, 24 aa, Severe acute respiratory syndrome coronavirus 2
WNSNNLDSKVGGNYNYLYRLFRKS

SEQ ID NO: 100542 - protein, 24 aa, Severe acute respiratory syndrome coronavirus 2
NSNNLDSKVGGNYNYLYRLFRKSN

SEQ ID NO: 100543 - protein, 24 aa, Severe acute respiratory syndrome coronavirus 2
SNNLDSKVGGNYNYLYRLFRKSNL

SEQ ID NO: 100544 - protein, 24 aa, Severe acute respiratory syndrome coronavirus 2
NNLDSKVGGNYNYLYRLFRKSNLK

SEQ ID NO: 100545 - protein, 24 aa, Severe acute respiratory syndrome coronavirus 2
NLDSKVGGNYNYLYRLFRKSNLKP

SEQ ID NO: 100546 - protein, 24 aa, Severe acute respiratory syndrome coronavirus 2
LDSKVGGNYNYLYRLFRKSNLKPF

SEQ ID NO: 100547 - protein, 24 aa, Severe acute respiratory syndrome coronavirus 2
DSKVGGNYNYLYRLFRKSNLKPFE

SEQ ID NO: 100548 - protein, 24 aa, Severe acute respiratory syndrome coronavirus 2
SKVGGNYNYLYRLFRKSNLKPFER

SEQ ID NO: 100549 - protein, 24 aa, Severe acute respiratory syndrome coronavirus 2
KVGGNYNYLYRLFRKSNLKPFERD

SEQ ID NO: 100550 - protein, 24 aa, Severe acute respiratory syndrome coronavirus 2
YGFQPTNGVGYQPYRVVVLSFELL

SEQ ID NO: 100551 - protein, 24 aa, Severe acute respiratory syndrome coronavirus 2
GFQPTNGVGYQPYRVVVLSFELLH

SEQ ID NO: 100552 - protein, 24 aa, Severe acute respiratory syndrome coronavirus 2
APATVCGPKKSTNLVKNKCVNFNF

SEQ ID NO: 100553 - protein, 24 aa, Severe acute respiratory syndrome coronavirus 2
PATVCGPKKSTNLVKNKCVNFNFN

SEQ ID NO: 100554 - protein, 24 aa, Severe acute respiratory syndrome coronavirus 2
ATVCGPKKSTNLVKNKCVNFNFNG

SEQ ID NO: 100555 - protein, 24 aa, Severe acute respiratory syndrome coronavirus 2
TVCGPKKSTNLVKNKCVNFNFNGL

SEQ ID NO: 100556 - protein, 24 aa, Severe acute respiratory syndrome coronavirus 2
VCGPKKSTNLVKNKCVNFNFNGLT

SEQ ID NO: 100557 - protein, 24 aa, Severe acute respiratory syndrome coronavirus 2
CGPKKSTNLVKNKCVNFNFNGLTG

SEQ ID NO: 100558 - protein, 24 aa, Severe acute respiratory syndrome coronavirus 2
GPKKSTNLVKNKCVNFNFNGLTGT

SEQ ID NO: 100559 - protein, 24 aa, Severe acute respiratory syndrome coronavirus 2
PKKSTNLVKNKCVNFNFNGLTGTG

SEQ ID NO: 100560 - protein, 24 aa, Severe acute respiratory syndrome coronavirus 2
KKSTNLVKNKCVNFNFNGLTGTGV

SEQ ID NO: 100561 - protein, 24 aa, Severe acute respiratory syndrome coronavirus 2
KSTNLVKNKCVNFNFNGLTGTGVL

SEQ ID NO: 100562 - protein, 24 aa, Severe acute respiratory syndrome coronavirus 2
STNLVKNKCVNFNFNGLTGTGVLT

SEQ ID NO: 100563 - protein, 24 aa, Severe acute respiratory syndrome coronavirus 2
TNLVKNKCVNFNFNGLTGTGVLTE

SEQ ID NO: 100564 - protein, 24 aa, Severe acute respiratory syndrome coronavirus 2
NLVKNKCVNFNFNGLTGTGVLTES

SEQ ID NO: 100565 - protein, 24 aa, Severe acute respiratory syndrome coronavirus 2
LVKNKCVNFNFNGLTGTGVLTESN

SEQ ID NO: 100566 - protein, 24 aa, Severe acute respiratory syndrome coronavirus 2
VKNKCVNFNFNGLTGTGVLTESNK

SEQ ID NO: 100567 - protein, 24 aa, Severe acute respiratory syndrome coronavirus 2
VRDPQTLEILDITPCSFGGVSVIT

SEQ ID NO: 100568 - protein, 24 aa, Severe acute respiratory syndrome coronavirus 2
RDPQTLEILDITPCSFGGVSVITP

SEQ ID NO: 100569 - protein, 24 aa, Severe acute respiratory syndrome coronavirus 2
DPQTLEILDITPCSFGGVSVITPG

SEQ ID NO: 100570 - protein, 24 aa, Severe acute respiratory syndrome coronavirus 2
PQTLEILDITPCSFGGVSVITPGT

SEQ ID NO: 100571 - protein, 24 aa, Severe acute respiratory syndrome coronavirus 2
QLTPTWRVYSTGSNVFQTRAGCLI

SEQ ID NO: 100572 - protein, 24 aa, Severe acute respiratory syndrome coronavirus 2
LTPTWRVYSTGSNVFQTRAGCLIG

SEQ ID NO: 100573 - protein, 24 aa, Severe acute respiratory syndrome coronavirus 2
TPTWRVYSTGSNVFQTRAGCLIGA

SEQ ID NO: 100574 - protein, 24 aa, Severe acute respiratory syndrome coronavirus 2
YICGDSTECSNLLLQYGSFCTQLN

SEQ ID NO: 100575 - protein, 24 aa, Severe acute respiratory syndrome coronavirus 2
GWTFGAGAALQIPFAMQMAYRFNG

SEQ ID NO: 100576 - protein, 24 aa, Severe acute respiratory syndrome coronavirus 2
WTFGAGAALQIPFAMQMAYRFNGI

SEQ ID NO: 100577 - protein, 24 aa, Severe acute respiratory syndrome coronavirus 2
TFGAGAALQIPFAMQMAYRFNGIG

SEQ ID NO: 100578 - protein, 24 aa, Severe acute respiratory syndrome coronavirus 2
FGAGAALQIPFAMQMAYRFNGIGV

SEQ ID NO: 100579 - protein, 24 aa, Severe acute respiratory syndrome coronavirus 2
GAGAALQIPFAMQMAYRFNGIGVT

SEQ ID NO: 100580 - protein, 24 aa, Severe acute respiratory syndrome coronavirus 2
AGAALQIPFAMQMAYRFNGIGVTQ

SEQ ID NO: 100581 - protein, 24 aa, Severe acute respiratory syndrome coronavirus 2
GAALQIPFAMQMAYRFNGIGVTQN

SEQ ID NO: 100582 - protein, 24 aa, Severe acute respiratory syndrome coronavirus 2
AALQIPFAMQMAYRFNGIGVTQNV

SEQ ID NO: 100583 - protein, 24 aa, Severe acute respiratory syndrome coronavirus 2
ALQIPFAMQMAYRFNGIGVTQNVL

SEQ ID NO: 100584 - protein, 24 aa, Severe acute respiratory syndrome coronavirus 2
LQIPFAMQMAYRFNGIGVTQNVLY

SEQ ID NO: 100585 - protein, 24 aa, Severe acute respiratory syndrome coronavirus 2
QIPFAMQMAYRFNGIGVTQNVLYE

SEQ ID NO: 100586 - protein, 24 aa, Severe acute respiratory syndrome coronavirus 2
IPFAMQMAYRFNGIGVTQNVLYEN

SEQ ID NO: 100587 - protein, 24 aa, Severe acute respiratory syndrome coronavirus 2
PFAMQMAYRFNGIGVTQNVLYENQ

SEQ ID NO: 100588 - protein, 24 aa, Severe acute respiratory syndrome coronavirus 2
FAMQMAYRFNGIGVTQNVLYENQK

SEQ ID NO: 100589 - protein, 24 aa, Severe acute respiratory syndrome coronavirus 2
AMQMAYRFNGIGVTQNVLYENQKL

SEQ ID NO: 100590 - protein, 24 aa, Severe acute respiratory syndrome coronavirus 2
MQMAYRFNGIGVTQNVLYENQKLI

SEQ ID NO: 100591 - protein, 24 aa, Severe acute respiratory syndrome coronavirus 2
QMAYRFNGIGVTQNVLYENQKLIA

SEQ ID NO: 100592 - protein, 24 aa, Severe acute respiratory syndrome coronavirus 2
MAYRFNGIGVTQNVLYENQKLIAN

SEQ ID NO: 100593 - protein, 24 aa, Severe acute respiratory syndrome coronavirus 2
AYRFNGIGVTQNVLYENQKLIANQ

SEQ ID NO: 100594 - protein, 24 aa, Severe acute respiratory syndrome coronavirus 2
YRFNGIGVTQNVLYENQKLIANQF

SEQ ID NO: 100595 - protein, 24 aa, Severe acute respiratory syndrome coronavirus 2
RFNGIGVTQNVLYENQKLIANQFN

SEQ ID NO: 100596 - protein, 24 aa, Severe acute respiratory syndrome coronavirus 2
LVKQLSSNFGAISSVLNDILSRLD

SEQ ID NO: 100597 - protein, 24 aa, Severe acute respiratory syndrome coronavirus 2
VKQLSSNFGAISSVLNDILSRLDK

SEQ ID NO: 100598 - protein, 24 aa, Severe acute respiratory syndrome coronavirus 2
KQLSSNFGAISSVLNDILSRLDKV

SEQ ID NO: 100599 - protein, 24 aa, Severe acute respiratory syndrome coronavirus 2
QLSSNFGAISSVLNDILSRLDKVE

SEQ ID NO: 100600 - protein, 24 aa, Severe acute respiratory syndrome coronavirus 2
LSSNFGAISSVLNDILSRLDKVEA

SEQ ID NO: 100601 - protein, 24 aa, Severe acute respiratory syndrome coronavirus 2
SSNFGAISSVLNDILSRLDKVEAE

SEQ ID NO: 100602 - protein, 24 aa, Severe acute respiratory syndrome coronavirus 2
SNFGAISSVLNDILSRLDKVEAEV

SEQ ID NO: 100603 - protein, 24 aa, Severe acute respiratory syndrome coronavirus 2
NFGAISSVLNDILSRLDKVEAEVQ

SEQ ID NO: 100604 - protein, 24 aa, Severe acute respiratory syndrome coronavirus 2
FGAISSVLNDILSRLDKVEAEVQI

SEQ ID NO: 100605 - protein, 24 aa, Severe acute respiratory syndrome coronavirus 2
GAISSVLNDILSRLDKVEAEVQID

SEQ ID NO: 100606 - protein, 24 aa, Severe acute respiratory syndrome coronavirus 2
AISSVLNDILSRLDKVEAEVQIDR

SEQ ID NO: 100607 - protein, 24 aa, Severe acute respiratory syndrome coronavirus 2
ISSVLNDILSRLDKVEAEVQIDRL

SEQ ID NO: 100608 - protein, 24 aa, Severe acute respiratory syndrome coronavirus 2
SSVLNDILSRLDKVEAEVQIDRLI

SEQ ID NO: 100609 - protein, 24 aa, Severe acute respiratory syndrome coronavirus 2
SVLNDILSRLDKVEAEVQIDRLIT

SEQ ID NO: 100610 - protein, 24 aa, Severe acute respiratory syndrome coronavirus 2
VLNDILSRLDKVEAEVQIDRLITG

SEQ ID NO: 100611 - protein, 24 aa, Severe acute respiratory syndrome coronavirus 2
LNDILSRLDKVEAEVQIDRLITGR

SEQ ID NO: 100612 - protein, 24 aa, Severe acute respiratory syndrome coronavirus 2
NDILSRLDKVEAEVQIDRLITGRL

SEQ ID NO: 100613 - protein, 24 aa, Severe acute respiratory syndrome coronavirus 2
DILSRLDKVEAEVQIDRLITGRLQ

SEQ ID NO: 100614 - protein, 24 aa, Severe acute respiratory syndrome coronavirus 2
ILSRLDKVEAEVQIDRLITGRLQS

SEQ ID NO: 100615 - protein, 24 aa, Severe acute respiratory syndrome coronavirus 2
LSRLDKVEAEVQIDRLITGRLQSL

SEQ ID NO: 100616 - protein, 24 aa, Severe acute respiratory syndrome coronavirus 2
SRLDKVEAEVQIDRLITGRLQSLQ

SEQ ID NO: 100617 - protein, 24 aa, Severe acute respiratory syndrome coronavirus 2
RLDKVEAEVQIDRLITGRLQSLQT

SEQ ID NO: 100618 - protein, 24 aa, Severe acute respiratory syndrome coronavirus 2
LDKVEAEVQIDRLITGRLQSLQTY

SEQ ID NO: 100619 - protein, 24 aa, Severe acute respiratory syndrome coronavirus 2
DKVEAEVQIDRLITGRLQSLQTYV

SEQ ID NO: 100620 - protein, 24 aa, Severe acute respiratory syndrome coronavirus 2
KVEAEVQIDRLITGRLQSLQTYVT

SEQ ID NO: 100621 - protein, 24 aa, Severe acute respiratory syndrome coronavirus 2
VEAEVQIDRLITGRLQSLQTYVTQ

SEQ ID NO: 100622 - protein, 24 aa, Severe acute respiratory syndrome coronavirus 2
EAEVQIDRLITGRLQSLQTYVTQQ

SEQ ID NO: 100623 - protein, 24 aa, Severe acute respiratory syndrome coronavirus 2
AEVQIDRLITGRLQSLQTYVTQQL

SEQ ID NO: 100624 - protein, 24 aa, Severe acute respiratory syndrome coronavirus 2
EVQIDRLITGRLQSLQTYVTQQLI

SEQ ID NO: 100625 - protein, 24 aa, Severe acute respiratory syndrome coronavirus 2
VQIDRLITGRLQSLQTYVTQQLIR

SEQ ID NO: 100626 - protein, 24 aa, Severe acute respiratory syndrome coronavirus 2
QIDRLITGRLQSLQTYVTQQLIRA

SEQ ID NO: 100627 - protein, 24 aa, Severe acute respiratory syndrome coronavirus 2
IDRLITGRLQSLQTYVTQQLIRAA

SEQ ID NO: 100628 - protein, 24 aa, Severe acute respiratory syndrome coronavirus 2
DRLITGRLQSLQTYVTQQLIRAAE

SEQ ID NO: 100629 - protein, 24 aa, Severe acute respiratory syndrome coronavirus 2
RLITGRLQSLQTYVTQQLIRAAEI

SEQ ID NO: 100630 - protein, 24 aa, Severe acute respiratory syndrome coronavirus 2
LITGRLQSLQTYVTQQLIRAAEIR

SEQ ID NO: 100631 - protein, 24 aa, Severe acute respiratory syndrome coronavirus 2
KMSECVLGQSKRVDFCGKGYHLMS

SEQ ID NO: 100632 - protein, 24 aa, Severe acute respiratory syndrome coronavirus 2
MSECVLGQSKRVDFCGKGYHLMSF

SEQ ID NO: 100633 - protein, 24 aa, Severe acute respiratory syndrome coronavirus 2
SECVLGQSKRVDFCGKGYHLMSFP

SEQ ID NO: 100634 - protein, 24 aa, Severe acute respiratory syndrome coronavirus 2
ECVLGQSKRVDFCGKGYHLMSFPQ

SEQ ID NO: 100635 - protein, 24 aa, Severe acute respiratory syndrome coronavirus 2
CVLGQSKRVDFCGKGYHLMSFPQS

SEQ ID NO: 100636 - protein, 24 aa, Severe acute respiratory syndrome coronavirus 2
VLGQSKRVDFCGKGYHLMSFPQSA

SEQ ID NO: 100637 - protein, 24 aa, Severe acute respiratory syndrome coronavirus 2
LGQSKRVDFCGKGYHLMSFPQSAP

SEQ ID NO: 100638 - protein, 24 aa, Severe acute respiratory syndrome coronavirus 2
GQSKRVDFCGKGYHLMSFPQSAPH

SEQ ID NO: 100639 - protein, 24 aa, Severe acute respiratory syndrome coronavirus 2
QSKRVDFCGKGYHLMSFPQSAPHG

SEQ ID NO: 100640 - protein, 24 aa, Severe acute respiratory syndrome coronavirus 2
SKRVDFCGKGYHLMSFPQSAPHGV

SEQ ID NO: 100641 - protein, 24 aa, Severe acute respiratory syndrome coronavirus 2
KRVDFCGKGYHLMSFPQSAPHGVV

SEQ ID NO: 100642 - protein, 24 aa, Severe acute respiratory syndrome coronavirus 2
RVDFCGKGYHLMSFPQSAPHGVVF

SEQ ID NO: 100643 - protein, 24 aa, Severe acute respiratory syndrome coronavirus 2
VDFCGKGYHLMSFPQSAPHGVVFL

SEQ ID NO: 100644 - protein, 24 aa, Severe acute respiratory syndrome coronavirus 2
DFCGKGYHLMSFPQSAPHGVVFLH

SEQ ID NO: 100645 - protein, 24 aa, Severe acute respiratory syndrome coronavirus 2
FCGKGYHLMSFPQSAPHGVVFLHV

SEQ ID NO: 100646 - protein, 24 aa, Severe acute respiratory syndrome coronavirus 2
CGKGYHLMSFPQSAPHGVVFLHVT

SEQ ID NO: 100647 - protein, 24 aa, Severe acute respiratory syndrome coronavirus 2
GKGYHLMSFPQSAPHGVVFLHVTY

SEQ ID NO: 100648 - protein, 24 aa, Severe acute respiratory syndrome coronavirus 2
KGYHLMSFPQSAPHGVVFLHVTYV

SEQ ID NO: 100649 - protein, 24 aa, Severe acute respiratory syndrome coronavirus 2
GYHLMSFPQSAPHGVVFLHVTYVP

SEQ ID NO: 100650 - protein, 24 aa, Severe acute respiratory syndrome coronavirus 2
YHLMSFPQSAPHGVVFLHVTYVPA

SEQ ID NO: 100651 - protein, 24 aa, Severe acute respiratory syndrome coronavirus 2
HLMSFPQSAPHGVVFLHVTYVPAQ

SEQ ID NO: 100652 - protein, 24 aa, Severe acute respiratory syndrome coronavirus 2
LMSFPQSAPHGVVFLHVTYVPAQE

SEQ ID NO: 100653 - protein, 24 aa, Severe acute respiratory syndrome coronavirus 2
MSFPQSAPHGVVFLHVTYVPAQEK

SEQ ID NO: 100654 - protein, 25 aa, Severe acute respiratory syndrome coronavirus 2
KNLREFVFKNIDGYFKIYSKHTPIN

SEQ ID NO: 100655 - protein, 25 aa, Severe acute respiratory syndrome coronavirus 2
NLREFVFKNIDGYFKIYSKHTPINL

SEQ ID NO: 100656 - protein, 25 aa, Severe acute respiratory syndrome coronavirus 2
LREFVFKNIDGYFKIYSKHTPINLV

SEQ ID NO: 100657 - protein, 25 aa, Severe acute respiratory syndrome coronavirus 2
REFVFKNIDGYFKIYSKHTPINLVR

SEQ ID NO: 100658 - protein, 25 aa, Severe acute respiratory syndrome coronavirus 2
GTITDAVDCALDPLSETKCTLKSFT

SEQ ID NO: 100659 - protein, 25 aa, Severe acute respiratory syndrome coronavirus 2
KLNDLCFTNVYADSFVIRGDEVRQI

SEQ ID NO: 100660 - protein, 25 aa, Severe acute respiratory syndrome coronavirus 2
LNDLCFTNVYADSFVIRGDEVRQIA

SEQ ID NO: 100661 - protein, 25 aa, Severe acute respiratory syndrome coronavirus 2
NDLCFTNVYADSFVIRGDEVRQIAP

SEQ ID NO: 100662 - protein, 25 aa, Severe acute respiratory syndrome coronavirus 2
DLCFTNVYADSFVIRGDEVRQIAPG

SEQ ID NO: 100663 - protein, 25 aa, Severe acute respiratory syndrome coronavirus 2
RGDEVRQIAPGQTGKIADYNYKLPD

SEQ ID NO: 100664 - protein, 25 aa, Severe acute respiratory syndrome coronavirus 2
GDEVRQIAPGQTGKIADYNYKLPDD

SEQ ID NO: 100665 - protein, 25 aa, Severe acute respiratory syndrome coronavirus 2
DEVRQIAPGQTGKIADYNYKLPDDF

SEQ ID NO: 100666 - protein, 25 aa, Severe acute respiratory syndrome coronavirus 2
EVRQIAPGQTGKIADYNYKLPDDFT

SEQ ID NO: 100667 - protein, 25 aa, Severe acute respiratory syndrome coronavirus 2
VRQIAPGQTGKIADYNYKLPDDFTG

SEQ ID NO: 100668 - protein, 25 aa, Severe acute respiratory syndrome coronavirus 2
RQIAPGQTGKIADYNYKLPDDFTGC

SEQ ID NO: 100669 - protein, 25 aa, Severe acute respiratory syndrome coronavirus 2
TGKIADYNYKLPDDFTGCVIAWNSN

SEQ ID NO: 100670 - protein, 25 aa, Severe acute respiratory syndrome coronavirus 2
GKIADYNYKLPDDFTGCVIAWNSNN

SEQ ID NO: 100671 - protein, 25 aa, Severe acute respiratory syndrome coronavirus 2
KIADYNYKLPDDFTGCVIAWNSNNL

SEQ ID NO: 100672 - protein, 25 aa, Severe acute respiratory syndrome coronavirus 2
IADYNYKLPDDFTGCVIAWNSNNLD

SEQ ID NO: 100673 - protein, 25 aa, Severe acute respiratory syndrome coronavirus 2
ADYNYKLPDDFTGCVIAWNSNNLDS

SEQ ID NO: 100674 - protein, 25 aa, Severe acute respiratory syndrome coronavirus 2
DYNYKLPDDFTGCVIAWNSNNLDSK

SEQ ID NO: 100675 - protein, 25 aa, Severe acute respiratory syndrome coronavirus 2
YNYKLPDDFTGCVIAWNSNNLDSKV

SEQ ID NO: 100676 - protein, 25 aa, Severe acute respiratory syndrome coronavirus 2
NYKLPDDFTGCVIAWNSNNLDSKVG

SEQ ID NO: 100677 - protein, 25 aa, Severe acute respiratory syndrome coronavirus 2
YKLPDDFTGCVIAWNSNNLDSKVGG

SEQ ID NO: 100678 - protein, 25 aa, Severe acute respiratory syndrome coronavirus 2
KLPDDFTGCVIAWNSNNLDSKVGGN

SEQ ID NO: 100679 - protein, 25 aa, Severe acute respiratory syndrome coronavirus 2
LPDDFTGCVIAWNSNNLDSKVGGNY

SEQ ID NO: 100680 - protein, 25 aa, Severe acute respiratory syndrome coronavirus 2
PDDFTGCVIAWNSNNLDSKVGGNYN

SEQ ID NO: 100681 - protein, 25 aa, Severe acute respiratory syndrome coronavirus 2
DDFTGCVIAWNSNNLDSKVGGNYNY

SEQ ID NO: 100682 - protein, 25 aa, Severe acute respiratory syndrome coronavirus 2
DFTGCVIAWNSNNLDSKVGGNYNYL

SEQ ID NO: 100683 - protein, 25 aa, Severe acute respiratory syndrome coronavirus 2
FTGCVIAWNSNNLDSKVGGNYNYLY

SEQ ID NO: 100684 - protein, 25 aa, Severe acute respiratory syndrome coronavirus 2
TGCVIAWNSNNLDSKVGGNYNYLYR

SEQ ID NO: 100685 - protein, 25 aa, Severe acute respiratory syndrome coronavirus 2
GCVIAWNSNNLDSKVGGNYNYLYRL

SEQ ID NO: 100686 - protein, 25 aa, Severe acute respiratory syndrome coronavirus 2
CVIAWNSNNLDSKVGGNYNYLYRLF

SEQ ID NO: 100687 - protein, 25 aa, Severe acute respiratory syndrome coronavirus 2
VIAWNSNNLDSKVGGNYNYLYRLFR

SEQ ID NO: 100688 - protein, 25 aa, Severe acute respiratory syndrome coronavirus 2
WNSNNLDSKVGGNYNYLYRLFRKSN

SEQ ID NO: 100689 - protein, 25 aa, Severe acute respiratory syndrome coronavirus 2
NSNNLDSKVGGNYNYLYRLFRKSNL

SEQ ID NO: 100690 - protein, 25 aa, Severe acute respiratory syndrome coronavirus 2
SNNLDSKVGGNYNYLYRLFRKSNLK

SEQ ID NO: 100691 - protein, 25 aa, Severe acute respiratory syndrome coronavirus 2
NNLDSKVGGNYNYLYRLFRKSNLKP

SEQ ID NO: 100692 - protein, 25 aa, Severe acute respiratory syndrome coronavirus 2
NLDSKVGGNYNYLYRLFRKSNLKPF

SEQ ID NO: 100693 - protein, 25 aa, Severe acute respiratory syndrome coronavirus 2
LDSKVGGNYNYLYRLFRKSNLKPFE

SEQ ID NO: 100694 - protein, 25 aa, Severe acute respiratory syndrome coronavirus 2
DSKVGGNYNYLYRLFRKSNLKPFER

SEQ ID NO: 100695 - protein, 25 aa, Severe acute respiratory syndrome coronavirus 2
SKVGGNYNYLYRLFRKSNLKPFERD

SEQ ID NO: 100696 - protein, 25 aa, Severe acute respiratory syndrome coronavirus 2
APATVCGPKKSTNLVKNKCVNFNFN

SEQ ID NO: 100697 - protein, 25 aa, Severe acute respiratory syndrome coronavirus 2
PATVCGPKKSTNLVKNKCVNFNFNG

SEQ ID NO: 100698 - protein, 25 aa, Severe acute respiratory syndrome coronavirus 2
ATVCGPKKSTNLVKNKCVNFNFNGL

SEQ ID NO: 100699 - protein, 25 aa, Severe acute respiratory syndrome coronavirus 2
TVCGPKKSTNLVKNKCVNFNFNGLT

SEQ ID NO: 100700 - protein, 25 aa, Severe acute respiratory syndrome coronavirus 2
VCGPKKSTNLVKNKCVNFNFNGLTG

SEQ ID NO: 100701 - protein, 25 aa, Severe acute respiratory syndrome coronavirus 2
CGPKKSTNLVKNKCVNFNFNGLTGT

SEQ ID NO: 100702 - protein, 25 aa, Severe acute respiratory syndrome coronavirus 2
GPKKSTNLVKNKCVNFNFNGLTGTG

SEQ ID NO: 100703 - protein, 25 aa, Severe acute respiratory syndrome coronavirus 2
PKKSTNLVKNKCVNFNFNGLTGTGV

SEQ ID NO: 100704 - protein, 25 aa, Severe acute respiratory syndrome coronavirus 2
KKSTNLVKNKCVNFNFNGLTGTGVL

SEQ ID NO: 100705 - protein, 25 aa, Severe acute respiratory syndrome coronavirus 2
KSTNLVKNKCVNFNFNGLTGTGVLT

SEQ ID NO: 100706 - protein, 25 aa, Severe acute respiratory syndrome coronavirus 2
STNLVKNKCVNFNFNGLTGTGVLTE

SEQ ID NO: 100707 - protein, 25 aa, Severe acute respiratory syndrome coronavirus 2
TNLVKNKCVNFNFNGLTGTGVLTES

SEQ ID NO: 100708 - protein, 25 aa, Severe acute respiratory syndrome coronavirus 2
NLVKNKCVNFNFNGLTGTGVLTESN

SEQ ID NO: 100709 - protein, 25 aa, Severe acute respiratory syndrome coronavirus 2
LVKNKCVNFNFNGLTGTGVLTESNK

SEQ ID NO: 100710 - protein, 25 aa, Severe acute respiratory syndrome coronavirus 2
VRDPQTLEILDITPCSFGGVSVITP

SEQ ID NO: 100711 - protein, 25 aa, Severe acute respiratory syndrome coronavirus 2
RDPQTLEILDITPCSFGGVSVITPG

SEQ ID NO: 100712 - protein, 25 aa, Severe acute respiratory syndrome coronavirus 2
DPQTLEILDITPCSFGGVSVITPGT

SEQ ID NO: 100713 - protein, 25 aa, Severe acute respiratory syndrome coronavirus 2
QLTPTWRVYSTGSNVFQTRAGCLIG

SEQ ID NO: 100714 - protein, 25 aa, Severe acute respiratory syndrome coronavirus 2
LTPTWRVYSTGSNVFQTRAGCLIGA

SEQ ID NO: 100715 - protein, 25 aa, Severe acute respiratory syndrome coronavirus 2
GWTFGAGAALQIPFAMQMAYRFNGI

SEQ ID NO: 100716 - protein, 25 aa, Severe acute respiratory syndrome coronavirus 2
WTFGAGAALQIPFAMQMAYRFNGIG

SEQ ID NO: 100717 - protein, 25 aa, Severe acute respiratory syndrome coronavirus 2
TFGAGAALQIPFAMQMAYRFNGIGV

SEQ ID NO: 100718 - protein, 25 aa, Severe acute respiratory syndrome coronavirus 2
FGAGAALQIPFAMQMAYRFNGIGVT

SEQ ID NO: 100719 - protein, 25 aa, Severe acute respiratory syndrome coronavirus 2
GAGAALQIPFAMQMAYRFNGIGVTQ

SEQ ID NO: 100720 - protein, 25 aa, Severe acute respiratory syndrome coronavirus 2
AGAALQIPFAMQMAYRFNGIGVTQN

SEQ ID NO: 100721 - protein, 25 aa, Severe acute respiratory syndrome coronavirus 2
GAALQIPFAMQMAYRFNGIGVTQNV

SEQ ID NO: 100722 - protein, 25 aa, Severe acute respiratory syndrome coronavirus 2
AALQIPFAMQMAYRFNGIGVTQNVL

SEQ ID NO: 100723 - protein, 25 aa, Severe acute respiratory syndrome coronavirus 2
ALQIPFAMQMAYRFNGIGVTQNVLY

SEQ ID NO: 100724 - protein, 25 aa, Severe acute respiratory syndrome coronavirus 2
LQIPFAMQMAYRFNGIGVTQNVLYE

SEQ ID NO: 100725 - protein, 25 aa, Severe acute respiratory syndrome coronavirus 2
QIPFAMQMAYRFNGIGVTQNVLYEN

SEQ ID NO: 100726 - protein, 25 aa, Severe acute respiratory syndrome coronavirus 2
IPFAMQMAYRFNGIGVTQNVLYENQ

SEQ ID NO: 100727 - protein, 25 aa, Severe acute respiratory syndrome coronavirus 2
PFAMQMAYRFNGIGVTQNVLYENQK

SEQ ID NO: 100728 - protein, 25 aa, Severe acute respiratory syndrome coronavirus 2
FAMQMAYRFNGIGVTQNVLYENQKL

SEQ ID NO: 100729 - protein, 25 aa, Severe acute respiratory syndrome coronavirus 2
AMQMAYRFNGIGVTQNVLYENQKLI

SEQ ID NO: 100730 - protein, 25 aa, Severe acute respiratory syndrome coronavirus 2
MQMAYRFNGIGVTQNVLYENQKLIA

SEQ ID NO: 100731 - protein, 25 aa, Severe acute respiratory syndrome coronavirus 2
QMAYRFNGIGVTQNVLYENQKLIAN

SEQ ID NO: 100732 - protein, 25 aa, Severe acute respiratory syndrome coronavirus 2
MAYRFNGIGVTQNVLYENQKLIANQ

SEQ ID NO: 100733 - protein, 25 aa, Severe acute respiratory syndrome coronavirus 2
AYRFNGIGVTQNVLYENQKLIANQF

SEQ ID NO: 100734 - protein, 25 aa, Severe acute respiratory syndrome coronavirus 2
YRFNGIGVTQNVLYENQKLIANQFN

SEQ ID NO: 100735 - protein, 25 aa, Severe acute respiratory syndrome coronavirus 2
LVKQLSSNFGAISSVLNDILSRLDK

SEQ ID NO: 100736 - protein, 25 aa, Severe acute respiratory syndrome coronavirus 2
VKQLSSNFGAISSVLNDILSRLDKV

SEQ ID NO: 100737 - protein, 25 aa, Severe acute respiratory syndrome coronavirus 2
KQLSSNFGAISSVLNDILSRLDKVE

SEQ ID NO: 100738 - protein, 25 aa, Severe acute respiratory syndrome coronavirus 2
QLSSNFGAISSVLNDILSRLDKVEA

SEQ ID NO: 100739 - protein, 25 aa, Severe acute respiratory syndrome coronavirus 2
LSSNFGAISSVLNDILSRLDKVEAE

SEQ ID NO: 100740 - protein, 25 aa, Severe acute respiratory syndrome coronavirus 2
SSNFGAISSVLNDILSRLDKVEAEV

SEQ ID NO: 100741 - protein, 25 aa, Severe acute respiratory syndrome coronavirus 2
SNFGAISSVLNDILSRLDKVEAEVQ

SEQ ID NO: 100742 - protein, 25 aa, Severe acute respiratory syndrome coronavirus 2
NFGAISSVLNDILSRLDKVEAEVQI

SEQ ID NO: 100743 - protein, 25 aa, Severe acute respiratory syndrome coronavirus 2
FGAISSVLNDILSRLDKVEAEVQID

SEQ ID NO: 100744 - protein, 25 aa, Severe acute respiratory syndrome coronavirus 2
GAISSVLNDILSRLDKVEAEVQIDR

SEQ ID NO: 100745 - protein, 25 aa, Severe acute respiratory syndrome coronavirus 2
AISSVLNDILSRLDKVEAEVQIDRL

SEQ ID NO: 100746 - protein, 25 aa, Severe acute respiratory syndrome coronavirus 2
ISSVLNDILSRLDKVEAEVQIDRLI

SEQ ID NO: 100747 - protein, 25 aa, Severe acute respiratory syndrome coronavirus 2
SSVLNDILSRLDKVEAEVQIDRLIT

SEQ ID NO: 100748 - protein, 25 aa, Severe acute respiratory syndrome coronavirus 2
SVLNDILSRLDKVEAEVQIDRLITG

SEQ ID NO: 100749 - protein, 25 aa, Severe acute respiratory syndrome coronavirus 2
VLNDILSRLDKVEAEVQIDRLITGR

SEQ ID NO: 100750 - protein, 25 aa, Severe acute respiratory syndrome coronavirus 2
LNDILSRLDKVEAEVQIDRLITGRL

SEQ ID NO: 100751 - protein, 25 aa, Severe acute respiratory syndrome coronavirus 2
NDILSRLDKVEAEVQIDRLITGRLQ

SEQ ID NO: 100752 - protein, 25 aa, Severe acute respiratory syndrome coronavirus 2
DILSRLDKVEAEVQIDRLITGRLQS

SEQ ID NO: 100753 - protein, 25 aa, Severe acute respiratory syndrome coronavirus 2
ILSRLDKVEAEVQIDRLITGRLQSL

SEQ ID NO: 100754 - protein, 25 aa, Severe acute respiratory syndrome coronavirus 2
LSRLDKVEAEVQIDRLITGRLQSLQ

SEQ ID NO: 100755 - protein, 25 aa, Severe acute respiratory syndrome coronavirus 2
SRLDKVEAEVQIDRLITGRLQSLQT

SEQ ID NO: 100756 - protein, 25 aa, Severe acute respiratory syndrome coronavirus 2
RLDKVEAEVQIDRLITGRLQSLQTY

SEQ ID NO: 100757 - protein, 25 aa, Severe acute respiratory syndrome coronavirus 2
LDKVEAEVQIDRLITGRLQSLQTYV

SEQ ID NO: 100758 - protein, 25 aa, Severe acute respiratory syndrome coronavirus 2
DKVEAEVQIDRLITGRLQSLQTYVT

SEQ ID NO: 100759 - protein, 25 aa, Severe acute respiratory syndrome coronavirus 2
KVEAEVQIDRLITGRLQSLQTYVTQ

SEQ ID NO: 100760 - protein, 25 aa, Severe acute respiratory syndrome coronavirus 2
VEAEVQIDRLITGRLQSLQTYVTQQ

SEQ ID NO: 100761 - protein, 25 aa, Severe acute respiratory syndrome coronavirus 2
EAEVQIDRLITGRLQSLQTYVTQQL

SEQ ID NO: 100762 - protein, 25 aa, Severe acute respiratory syndrome coronavirus 2
AEVQIDRLITGRLQSLQTYVTQQLI

SEQ ID NO: 100763 - protein, 25 aa, Severe acute respiratory syndrome coronavirus 2
EVQIDRLITGRLQSLQTYVTQQLIR

SEQ ID NO: 100764 - protein, 25 aa, Severe acute respiratory syndrome coronavirus 2
VQIDRLITGRLQSLQTYVTQQLIRA

SEQ ID NO: 100765 - protein, 25 aa, Severe acute respiratory syndrome coronavirus 2
QIDRLITGRLQSLQTYVTQQLIRAA

SEQ ID NO: 100766 - protein, 25 aa, Severe acute respiratory syndrome coronavirus 2
IDRLITGRLQSLQTYVTQQLIRAAE

SEQ ID NO: 100767 - protein, 25 aa, Severe acute respiratory syndrome coronavirus 2
DRLITGRLQSLQTYVTQQLIRAAEI

SEQ ID NO: 100768 - protein, 25 aa, Severe acute respiratory syndrome coronavirus 2
RLITGRLQSLQTYVTQQLIRAAEIR

SEQ ID NO: 100769 - protein, 25 aa, Severe acute respiratory syndrome coronavirus 2
KMSECVLGQSKRVDFCGKGYHLMSF

SEQ ID NO: 100770 - protein, 25 aa, Severe acute respiratory syndrome coronavirus 2
MSECVLGQSKRVDFCGKGYHLMSFP

SEQ ID NO: 100771 - protein, 25 aa, Severe acute respiratory syndrome coronavirus 2
SECVLGQSKRVDFCGKGYHLMSFPQ

SEQ ID NO: 100772 - protein, 25 aa, Severe acute respiratory syndrome coronavirus 2
ECVLGQSKRVDFCGKGYHLMSFPQS

SEQ ID NO: 100773 - protein, 25 aa, Severe acute respiratory syndrome coronavirus 2
CVLGQSKRVDFCGKGYHLMSFPQSA

SEQ ID NO: 100774 - protein, 25 aa, Severe acute respiratory syndrome coronavirus 2
VLGQSKRVDFCGKGYHLMSFPQSAP

SEQ ID NO: 100775 - protein, 25 aa, Severe acute respiratory syndrome coronavirus 2
LGQSKRVDFCGKGYHLMSFPQSAPH

SEQ ID NO: 100776 - protein, 25 aa, Severe acute respiratory syndrome coronavirus 2
GQSKRVDFCGKGYHLMSFPQSAPHG

SEQ ID NO: 100777 - protein, 25 aa, Severe acute respiratory syndrome coronavirus 2
QSKRVDFCGKGYHLMSFPQSAPHGV

SEQ ID NO: 100778 - protein, 25 aa, Severe acute respiratory syndrome coronavirus 2
SKRVDFCGKGYHLMSFPQSAPHGVV

SEQ ID NO: 100779 - protein, 25 aa, Severe acute respiratory syndrome coronavirus 2
KRVDFCGKGYHLMSFPQSAPHGVVF

SEQ ID NO: 100780 - protein, 25 aa, Severe acute respiratory syndrome coronavirus 2
RVDFCGKGYHLMSFPQSAPHGVVFL

SEQ ID NO: 100781 - protein, 25 aa, Severe acute respiratory syndrome coronavirus 2
VDFCGKGYHLMSFPQSAPHGVVFLH

SEQ ID NO: 100782 - protein, 25 aa, Severe acute respiratory syndrome coronavirus 2
DFCGKGYHLMSFPQSAPHGVVFLHV

SEQ ID NO: 100783 - protein, 25 aa, Severe acute respiratory syndrome coronavirus 2
FCGKGYHLMSFPQSAPHGVVFLHVT

SEQ ID NO: 100784 - protein, 25 aa, Severe acute respiratory syndrome coronavirus 2
CGKGYHLMSFPQSAPHGVVFLHVTY

SEQ ID NO: 100785 - protein, 25 aa, Severe acute respiratory syndrome coronavirus 2
GKGYHLMSFPQSAPHGVVFLHVTYV

SEQ ID NO: 100786 - protein, 25 aa, Severe acute respiratory syndrome coronavirus 2
KGYHLMSFPQSAPHGVVFLHVTYVP

SEQ ID NO: 100787 - protein, 25 aa, Severe acute respiratory syndrome coronavirus 2
GYHLMSFPQSAPHGVVFLHVTYVPA

SEQ ID NO: 100788 - protein, 25 aa, Severe acute respiratory syndrome coronavirus 2
YHLMSFPQSAPHGVVFLHVTYVPAQ

SEQ ID NO: 100789 - protein, 25 aa, Severe acute respiratory syndrome coronavirus 2
HLMSFPQSAPHGVVFLHVTYVPAQE

SEQ ID NO: 100790 - protein, 25 aa, Severe acute respiratory syndrome coronavirus 2
LMSFPQSAPHGVVFLHVTYVPAQEK

SEQ ID NO: 100791 - protein, 19 aa, synthetic construct
  source 1..19: note = Seed: VEAEVQIDRLITGRLQSLQ
VEAEVQIDRFITIRIQSLQ

SEQ ID NO: 100792 - protein, 19 aa, synthetic construct
  source 1..19: note = Seed: SELVIGAVILRGHLRIAGH
SELVIGAVFLRNHFRILGH

SEQ ID NO: 100793 - protein, 19 aa, synthetic construct
  source 1..19: note = Seed: VEAEVQIDRLITGRLQSLQ
VEAEVQIDRFITLRFQSIQ

SEQ ID NO: 100794 - protein, 19 aa, synthetic construct
  source 1..19: note = Seed: VEAEVQIDRLITGRLQSLQ
VEAEVQIDRFITMRIQSLQ

SEQ ID NO: 100795 - protein, 19 aa, synthetic construct
  source 1..19: note = Seed: VEAEVQIDRLITGRLQSLQ
VEAEVQIDRFITIRLQSLQ

SEQ ID NO: 100796 - protein, 19 aa, synthetic construct
  source 1..19: note = Seed: VEAEVQIDRLITGRLQSLQ
VEAEVQIDRFITVRIQSIQ

SEQ ID NO: 100797 - protein, 19 aa, synthetic construct
  source 1..19: note = Seed: SELVIGAVILRGHLRIAGH
SELFIGEVFLREHLRIAGH

SEQ ID NO: 100798 - protein, 19 aa, synthetic construct
  source 1..19: note = Seed: SELVIGAVILRGHLRIAGH
SELVIGAIILNGALRYAGH

SEQ ID NO: 100799 - protein, 19 aa, synthetic construct
  source 1..19: note = Seed: VEAEVQIDRLITGRLQSLQ
VEAEVQIDRFITVRIQSLQ

SEQ ID NO: 100800 - protein, 19 aa, synthetic construct
  source 1..19: note = Seed: VEAEVQIDRLITGRLQSLQ
VEAEVQIDRFITIRFQSFQ

SEQ ID NO: 100801 - protein, 19 aa, synthetic construct
  source 1..19: note = Seed: VEAEVQIDRLITGRLQSLQ
VEAEVQIDRFITIRYQSLQ

SEQ ID NO: 100802 - protein, 19 aa, synthetic construct
  source 1..19: note = Seed: VEAEVQIDRLITGRLQSLQ
VEAEVQIDRFITVRFQSFQ

SEQ ID NO: 100803 - protein, 19 aa, synthetic construct
  source 1..19: note = Seed: VEAEVQIDRLITGRLQSLQ
VEAEVQIDRFITFRFQSLQ

SEQ ID NO: 100804 - protein, 19 aa, synthetic construct
  source 1..19: note = Seed: SELVIGAVILRGHLRIAGH
SELFIGTVYLRVHLRIAGH

SEQ ID NO: 100805 - protein, 19 aa, synthetic construct
  source 1..19: note = Seed: VEAEVQIDRLITGRLQSLQ
VEAEVQIDRYITSRFQSLQ

SEQ ID NO: 100806 - protein, 19 aa, synthetic construct
  source 1..19: note = Seed: VEAEVQIDRLITGRLQSLQ
VEAEVQIDRFITVRYQSIQ

SEQ ID NO: 100807 - protein, 19 aa, synthetic construct
  source 1..19: note = Seed: VEAEVQIDRLITGRLQSLQ
VEAEVQIDRFITVRFQSTQ

SEQ ID NO: 100808 - protein, 19 aa, synthetic construct
  source 1..19: note = Seed: VEAEVQIDRLITGRLQSLQ
VEAEVQIDRFITVRFQSYQ

SEQ ID NO: 100809 - protein, 19 aa, synthetic construct
  source 1..19: note = Seed: SELVIGAVILRGHLRIAGH
SELVIGAVFLRVHFRILGH

SEQ ID NO: 100810 - protein, 19 aa, synthetic construct
  source 1..19: note = Seed: VEAEVQIDRLITGRLQSLQ
VEAEVQIDRFITIRFQSYQ

SEQ ID NO: 100811 - protein, 19 aa, synthetic construct
  source 1..19: note = Seed: VKDCVVLHSYFTSDYYQLY
VKDFVVAHPYFASDYYQLY

SEQ ID NO: 100812 - protein, 19 aa, synthetic construct
  source 1..19: note = Seed: VEAEVQIDRLITGRLQSLQ
VEAEVQIDRYITSRFQSVQ

SEQ ID NO: 100813 - protein, 19 aa, synthetic construct
  source 1..19: note = Seed: VEAEVQIDRLITGRLQSLQ
VEAEVQIDRFITLRFQSFQ

SEQ ID NO: 100814 - protein, 19 aa, synthetic construct
  source 1..19: note = Seed: VEAEVQIDRLITGRLQSLQ
VEAEVQIDRFITLRFQSMQ

SEQ ID NO: 100815 - protein, 19 aa, synthetic construct
  source 1..19: note = Seed: VEAEVQIDRLITGRLQSLQ
VEAEVQYDRAIAGRLQSLQ

SEQ ID NO: 100816 - protein, 19 aa, synthetic construct
  source 1..19: note = Seed: SELVIGAVILRGHLRIAGH
SELVIGAVFLRNHYRIVGH

SEQ ID NO: 100817 - protein, 19 aa, synthetic construct
  source 1..19: note = Seed: VEAEVQIDRLITGRLQSLQ
VEAEVQIDRFITMRFQSFQ

SEQ ID NO: 100818 - protein, 19 aa, synthetic construct
  source 1..19: note = Seed: SELVIGAVILRGHLRIAGH
SELYIGLVSLRPHLRIAGH

SEQ ID NO: 100819 - protein, 19 aa, synthetic construct
  source 1..19: note = Seed: VEAEVQIDRLITGRLQSLQ
VEAEMQIRRNITRRLQSLQ

SEQ ID NO: 100820 - protein, 19 aa, synthetic construct
  source 1..19: note = Seed: VEAEVQIDRLITGRLQSLQ
VEAEVQIDRFITSRYQSLQ

SEQ ID NO: 100821 - protein, 19 aa, synthetic construct
  source 1..19: note = Seed: VEAEVQIDRLITGRLQSLQ
VEAELQILRFITHRLQSLQ

SEQ ID NO: 100822 - protein, 19 aa, synthetic construct
  source 1..19: note = Seed: VEAEVQIDRLITGRLQSLQ
VEAEVQIDRFITVRFQSPQ

SEQ ID NO: 100823 - protein, 19 aa, synthetic construct
  source 1..19: note = Seed: VEAEVQIDRLITGRLQSLQ
VEAEVQIDRFITSRFQSTQ

SEQ ID NO: 100824 - protein, 19 aa, synthetic construct
  source 1..19: note = Seed: VEAEVQIDRLITGRLQSLQ
VEAEVQIDRFITIRIQSIQ

SEQ ID NO: 100825 - protein, 19 aa, synthetic construct
  source 1..19: note = Seed: VEAEVQIDRLITGRLQSLQ
VEAEVQIDRFITLRYQSVQ

SEQ ID NO: 100826 - protein, 19 aa, synthetic construct
  source 1..19: note = Seed: VEAEVQIDRLITGRLQSLQ
VEAEVQIDRFITIRIQSVQ

SEQ ID NO: 100827 - protein, 19 aa, synthetic construct
  source 1..19: note = Seed: VEAEVQIDRLITGRLQSLQ
VEAEMQIIRRITNRLQSLQ

SEQ ID NO: 100828 - protein, 19 aa, synthetic construct
  source 1..19: note = Seed: VEAEVQIDRLITGRLQSLQ
VEAEVQIDRFITTRWQSLQ

SEQ ID NO: 100829 - protein, 19 aa, synthetic construct
  source 1..19: note = Seed: VEAEVQIDRLITGRLQSLQ
VEAEVQIDRWITTRFQSIQ

SEQ ID NO: 100830 - protein, 19 aa, synthetic construct
  source 1..19: note = Seed: VEAEVQIDRLITGRLQSLQ
VEAEVQIDRFITLRFQSTQ

SEQ ID NO: 100831 - protein, 19 aa, synthetic construct
  source 1..19: note = Seed: VEAEVQIDRLITGRLQSLQ
VEAEVQIDRFITTRMQSLQ

SEQ ID NO: 100832 - protein, 19 aa, synthetic construct
  source 1..19: note = Seed: VEAEVQIDRLITGRLQSLQ
VEAEVQIDRFITTRLQSLQ

SEQ ID NO: 100833 - protein, 19 aa, synthetic construct
  source 1..19: note = Seed: VEAEVQIDRLITGRLQSLQ
VEAEVQIDRIITARFQSVQ

SEQ ID NO: 100834 - protein, 19 aa, synthetic construct
  source 1..19: note = Seed: VEAEVQIDRLITGRLQSLQ
VEAEVQIDRFITTRWQSIQ

SEQ ID NO: 100835 - protein, 19 aa, synthetic construct
  source 1..19: note = Seed: VEAEVQIDRLITGRLQSLQ
VEAEVQIDRFITIRFQSEQ

SEQ ID NO: 100836 - protein, 19 aa, synthetic construct
  source 1..19: note = Seed: VEAEVQIDRLITGRLQSLQ
VEAEVQIDRFITFRYQSVQ

SEQ ID NO: 100837 - protein, 19 aa, synthetic construct
  source 1..19: note = Seed: VEAEVQIDRLITGRLQSLQ
VEAEVQIDRFITLRYQSLQ

SEQ ID NO: 100838 - protein, 19 aa, synthetic construct
  source 1..19: note = Seed: VEAEVQIDRLITGRLQSLQ
VEAEVQIDRFITIRWQSMQ

SEQ ID NO: 100839 - protein, 19 aa, synthetic construct
  source 1..19: note = Seed: SFRLFARTRSMWSFNPETN
SIRLMAKTRRMWSFNPETN

SEQ ID NO: 100840 - protein, 19 aa, synthetic construct
  source 1..19: note = Seed: VEAEVQIDRLITGRLQSLQ
VEAEVQIDRFITFRFQSFQ

SEQ ID NO: 100841 - protein, 19 aa, synthetic construct
  source 1..19: note = Seed: VEAEVQIDRLITGRLQSLQ
VEAEVQIDRFITIRLQSIQ

SEQ ID NO: 100842 - protein, 19 aa, synthetic construct
  source 1..19: note = Seed: VEAEVQIDRLITGRLQSLQ
VEAEVQIDRFITARYQSVQ

SEQ ID NO: 100843 - protein, 19 aa, synthetic construct
  source 1..19: note = Seed: SFRLFARTRSMWSFNPETN
SFRLFARTRSFWSINFETV

SEQ ID NO: 100844 - protein, 19 aa, synthetic construct
  source 1..19: note = Seed: VEAEVQIDRLITGRLQSLQ
VEAEVQIDRFITIRWQSVQ

SEQ ID NO: 100845 - protein, 19 aa, synthetic construct
  source 1..19: note = Seed: VEAEVQIDRLITGRLQSLQ
VEAEVQIDRFITFRMQSMQ

SEQ ID NO: 100846 - protein, 19 aa, synthetic construct
  source 1..19: note = Seed: VEAEVQIDRLITGRLQSLQ
VEAEVQIDRFITIRWQSIQ

SEQ ID NO: 100847 - protein, 19 aa, synthetic construct
  source 1..19: note = Seed: VEAEVQIDRLITGRLQSLQ
VEAEVQIDRFITLRFQSYQ

SEQ ID NO: 100848 - protein, 19 aa, synthetic construct
  source 1..19: note = Seed: VEAEVQIDRLITGRLQSLQ
VEAEVQIDRFITVRAQSIQ

SEQ ID NO: 100849 - protein, 19 aa, synthetic construct
  source 1..19: note = Seed: VEAEVQIDRLITGRLQSLQ
VEAEVQIDRFITVRLQSVQ

SEQ ID NO: 100850 - protein, 19 aa, synthetic construct
  source 1..19: note = Seed: VEAEVQIDRLITGRLQSLQ
VEAEVQIDRFITSRWQSLQ

SEQ ID NO: 100851 - protein, 19 aa, synthetic construct
  source 1..19: note = Seed: SELVIGAVILRGHLRIAGH
SELVIGAVFLRNHFRICGH

SEQ ID NO: 100852 - protein, 19 aa, synthetic construct
  source 1..19: note = Seed: VEAEVQIDRLITGRLQSLQ
VEAEVQIDRFITIRWQSLQ

SEQ ID NO: 100853 - protein, 19 aa, synthetic construct
  source 1..19: note = Seed: VEAEVQIDRLITGRLQSLQ
VEAEVQIDRFITVRFQSDQ

SEQ ID NO: 100854 - protein, 19 aa, synthetic construct
  source 1..19: note = Seed: VEAEVQIDRLITGRLQSLQ
VEAEVQIDRFITMRFQSYQ

SEQ ID NO: 100855 - protein, 19 aa, synthetic construct
  source 1..19: note = Seed: VEAEVQIDRLITGRLQSLQ
VEAEVQIDRFITKRFQSLQ

SEQ ID NO: 100856 - protein, 19 aa, synthetic construct
  source 1..19: note = Seed: VEAEVQIDRLITGRLQSLQ
VEAEVQIDRFITIRLQSVQ

SEQ ID NO: 100857 - protein, 19 aa, synthetic construct
  source 1..19: note = Seed: VEAEVQIDRLITGRLQSLQ
VEAEVQIDRYITHRFQSLQ

SEQ ID NO: 100858 - protein, 19 aa, synthetic construct
  source 1..19: note = Seed: VEAEVQIDRLITGRLQSLQ
VEAEVQIDRFITFRYQSLQ

SEQ ID NO: 100859 - protein, 19 aa, synthetic construct
  source 1..19: note = Seed: VEAEVQIDRLITGRLQSLQ
VEAEVQIDRFITVRYQSMQ

SEQ ID NO: 100860 - protein, 19 aa, synthetic construct
  source 1..19: note = Seed: VEAEVQIDRLITGRLQSLQ
VEAEVQIDRFITVRWQSVQ

SEQ ID NO: 100861 - protein, 19 aa, synthetic construct
  source 1..19: note = Seed: VEAEVQIDRLITGRLQSLQ
VEAEFQISRFITVRLQSLQ

SEQ ID NO: 100862 - protein, 19 aa, synthetic construct
  source 1..19: note = Seed: VEAEVQIDRLITGRLQSLQ
VEAEVQIDRIITIRFQSIQ

SEQ ID NO: 100863 - protein, 19 aa, synthetic construct
  source 1..19: note = Seed: SFRLFARTRSMWSFNPETN
SFRLLARLRRMWHFNPETN

SEQ ID NO: 100864 - protein, 19 aa, synthetic construct
  source 1..19: note = Seed: VEAEVQIDRLITGRLQSLQ
VEAEVQIDRYITFRFQSVQ

SEQ ID NO: 100865 - protein, 19 aa, synthetic construct
  source 1..19: note = Seed: VEAEVQIDRLITGRLQSLQ
VEAEVQIDRFITIRYQSMQ

SEQ ID NO: 100866 - protein, 19 aa, synthetic construct
  source 1..19: note = Seed: SFRLFARTRSMWSFNPETN
SFRLFARTFSMTSFNPLTN

SEQ ID NO: 100867 - protein, 19 aa, synthetic construct
  source 1..19: note = Seed: VEAEVQIDRLITGRLQSLQ
VEAEVQIDRYITLRFQSIQ

SEQ ID NO: 100868 - protein, 19 aa, synthetic construct
  source 1..19: note = Seed: VEAEVQIDRLITGRLQSLQ
VEAEVQIDRFITMRMQSVQ

SEQ ID NO: 100869 - protein, 19 aa, synthetic construct
  source 1..19: note = Seed: VEAEVQIDRLITGRLQSLQ
VEAEVQIDRWITIRFQSVQ

SEQ ID NO: 100870 - protein, 19 aa, synthetic construct
  source 1..19: note = Seed: VEAEVQIDRLITGRLQSLQ
VEAEFQIERFITTRLQSLQ

SEQ ID NO: 100871 - protein, 19 aa, synthetic construct
  source 1..19: note = Seed: VEAEVQIDRLITGRLQSLQ
VEAEVQIDRFITLRFQSNQ

SEQ ID NO: 100872 - protein, 19 aa, synthetic construct
  source 1..19: note = Seed: VEAEVQIDRLITGRLQSLQ
VEAEVQIDRFITMRYQSIQ

SEQ ID NO: 100873 - protein, 19 aa, synthetic construct
  source 1..19: note = Seed: VEAEVQIDRLITGRLQSLQ
VEAEVQIDRFITVRWQSLQ

SEQ ID NO: 100874 - protein, 19 aa, synthetic construct
  source 1..19: note = Seed: VEAEVQIDRLITGRLQSLQ
VEAEFQITRFITVRLQSLQ

SEQ ID NO: 100875 - protein, 19 aa, synthetic construct
  source 1..19: note = Seed: VEAEVQIDRLITGRLQSLQ
VEAEVQIDRFITSRLQSLQ

SEQ ID NO: 100876 - protein, 19 aa, synthetic construct
  source 1..19: note = Seed: VEAEVQIDRLITGRLQSLQ
VEAEVQIDRFITTRFQSEQ

SEQ ID NO: 100877 - protein, 19 aa, synthetic construct
  source 1..19: note = Seed: VEAEVQIDRLITGRLQSLQ
VEAEVQIDRFITVRWQSIQ

SEQ ID NO: 100878 - protein, 19 aa, synthetic construct
  source 1..19: note = Seed: VEAEVQIDRLITGRLQSLQ
VEAEFQIQRFITTRLQSLQ

SEQ ID NO: 100879 - protein, 19 aa, synthetic construct
  source 1..19: note = Seed: VEAEVQIDRLITGRLQSLQ
VEAEVQIDRIITHRFQSLQ

SEQ ID NO: 100880 - protein, 19 aa, synthetic construct
  source 1..19: note = Seed: VEAEVQIDRLITGRLQSLQ
VEAEVQIDRFITFRFQSSQ

SEQ ID NO: 100881 - protein, 19 aa, synthetic construct
  source 1..19: note = Seed: VEAEVQIDRLITGRLQSLQ
VEAEVQIDRFITTRIQSLQ

SEQ ID NO: 100882 - protein, 19 aa, synthetic construct
  source 1..19: note = Seed: SELVIGAVILRGHLRIAGH
SELVIGANILNGVLRIAGH

SEQ ID NO: 100883 - protein, 19 aa, synthetic construct
  source 1..19: note = Seed: VEAEVQIDRLITGRLQSLQ
VEAEVQIDRFITVRYQSFQ

SEQ ID NO: 100884 - protein, 19 aa, synthetic construct
  source 1..19: note = Seed: SELVIGAVILRGHLRIAGH
SELWIGTVFLREHLRIAGH

SEQ ID NO: 100885 - protein, 19 aa, synthetic construct
  source 1..19: note = Seed: SELVIGAVILRGHLRIAGH
SELYIGEVYLRVHLRIAGH

SEQ ID NO: 100886 - protein, 19 aa, synthetic construct
  source 1..19: note = Seed: VEAEVQIDRLITGRLQSLQ
VEAEVQIDRFITARWQSVQ

SEQ ID NO: 100887 - protein, 19 aa, synthetic construct
  source 1..19: note = Seed: VEAEVQIDRLITGRLQSLQ
VEAEVQIDRYITMRFQSVQ

SEQ ID NO: 100888 - protein, 19 aa, synthetic construct
  source 1..19: note = Seed: SFRLFARTRSMWSFNPETN
SFRLFARTFSMTSFNPITN

SEQ ID NO: 100889 - protein, 19 aa, synthetic construct
  source 1..19: note = Seed: SELVIGAVILRGHLRIAGH
SELCIGTVFLRIHLRIAGH

SEQ ID NO: 100890 - protein, 19 aa, synthetic construct
  source 1..19: note = Seed: VEAEVQIDRLITGRLQSLQ
VEAEMQIRRSITRRLQSLQ

SEQ ID NO: 100891 - protein, 19 aa, synthetic construct
  source 1..19: note = Seed: VEAEVQIDRLITGRLQSLQ
VEAEVQIDRWITVRFQSVQ

SEQ ID NO: 100892 - protein, 19 aa, synthetic construct
  source 1..19: note = Seed: SFRLFARTRSMWSFNPETN
SIRLMARTRKMWSFNPETN

SEQ ID NO: 100893 - protein, 19 aa, synthetic construct
  source 1..19: note = Seed: VEAEVQIDRLITGRLQSLQ
VEAEVQIDRFITMRYQSFQ

SEQ ID NO: 100894 - protein, 19 aa, synthetic construct
  source 1..19: note = Seed: VEAEVQIDRLITGRLQSLQ
VEAEVQIDRYITHRFQSVQ

SEQ ID NO: 100895 - protein, 19 aa, synthetic construct
  source 1..19: note = Seed: VEAEVQIDRLITGRLQSLQ
VEAEVQIDRFITTRIQSIQ

SEQ ID NO: 100896 - protein, 19 aa, synthetic construct
  source 1..19: note = Seed: VEAEVQIDRLITGRLQSLQ
VEAEVQIDRFITTRLQSFQ

SEQ ID NO: 100897 - protein, 19 aa, synthetic construct
  source 1..19: note = Seed: VEAEVQIDRLITGRLQSLQ
VEAEVQIDRFITSRWQSVQ

SEQ ID NO: 100898 - protein, 19 aa, synthetic construct
  source 1..19: note = Seed: VEAEVQIDRLITGRLQSLQ
VEAEVQIDRFITIRIQSEQ

SEQ ID NO: 100899 - protein, 19 aa, synthetic construct
  source 1..19: note = Seed: VEAEVQIDRLITGRLQSLQ
VEAEFQITRFITERLQSLQ

SEQ ID NO: 100900 - protein, 19 aa, synthetic construct
  source 1..19: note = Seed: VEAEVQIDRLITGRLQSLQ
VEAEVQIDRFITSRMQSLQ

SEQ ID NO: 100901 - protein, 19 aa, synthetic construct
  source 1..19: note = Seed: VEAEVQIDRLITGRLQSLQ
VEAEFQIHRFITTRLQSLQ

SEQ ID NO: 100902 - protein, 19 aa, synthetic construct
  source 1..19: note = Seed: VEAEVQIDRLITGRLQSLQ
VEAEVQIDRFITARLQSLQ

SEQ ID NO: 100903 - protein, 19 aa, synthetic construct
  source 1..19: note = Seed: VEAEVQIDRLITGRLQSLQ
VEAEVQIDRFITIRYQSFQ

SEQ ID NO: 100904 - protein, 19 aa, synthetic construct
  source 1..19: note = Seed: VEAEVQIDRLITGRLQSLQ
VEAEVQIDRLITTRFQSFQ

SEQ ID NO: 100905 - protein, 19 aa, synthetic construct
  source 1..19: note = Seed: VEAEVQIDRLITGRLQSLQ
VEAEVQIDRFITLRFQSSQ

SEQ ID NO: 100906 - protein, 19 aa, synthetic construct
  source 1..19: note = Seed: VEAEVQIDRLITGRLQSLQ
VEAEVQIDRLITLRFQSIQ

SEQ ID NO: 100907 - protein, 19 aa, synthetic construct
  source 1..19: note = Seed: SELVIGAVILRGHLRIAGH
SELRIGTVFLRIHLRIAGH

SEQ ID NO: 100908 - protein, 19 aa, synthetic construct
  source 1..19: note = Seed: SELVIGAVILRGHLRIAGH
SELFIGYVFLREHLRIAGH

SEQ ID NO: 100909 - protein, 19 aa, synthetic construct
  source 1..19: note = Seed: VEAEVQIDRLITGRLQSLQ
VEAEVQIDRLITMRFQSIQ

SEQ ID NO: 100910 - protein, 19 aa, synthetic construct
  source 1..19: note = Seed: VEAEVQIDRLITGRLQSLQ
VEAEVQIDRFITLRFQSEQ

SEQ ID NO: 100911 - protein, 19 aa, synthetic construct
  source 1..19: note = Seed: VEAEVQIDRLITGRLQSLQ
VEAEFQIARFITTRLQSLQ

SEQ ID NO: 100912 - protein, 19 aa, synthetic construct
  source 1..19: note = Seed: VEAEVQIDRLITGRLQSLQ
VEAELQIERFITTRLQSLQ

SEQ ID NO: 100913 - protein, 19 aa, synthetic construct
  source 1..19: note = Seed: SELVIGAVILRGHLRIAGH
SELFIGFVYLRPHLRIAGH

SEQ ID NO: 100914 - protein, 19 aa, synthetic construct
  source 1..19: note = Seed: VEAEVQIDRLITGRLQSLQ
VEAEVQIDRFITYRFQSMQ

SEQ ID NO: 100915 - protein, 19 aa, synthetic construct
  source 1..19: note = Seed: VEAEVQIDRLITGRLQSLQ
VEAEVQIDRYITQRFQSIQ

SEQ ID NO: 100916 - protein, 19 aa, synthetic construct
  source 1..19: note = Seed: SELVIGAVILRGHLRIAGH
SELLIGQVFLREHLRIAGH

SEQ ID NO: 100917 - protein, 19 aa, synthetic construct
  source 1..19: note = Seed: GAGAALQIPFAMQMAYRFN
GAGAALQMPFFMNMAARFN

SEQ ID NO: 100918 - protein, 19 aa, synthetic construct
  source 1..19: note = Seed: VEAEVQIDRLITGRLQSLQ
VEAEVQIDRIITMRFQSVQ

SEQ ID NO: 100919 - protein, 19 aa, synthetic construct
  source 1..19: note = Seed: VEAEVQIDRLITGRLQSLQ
VEAEVQIDRFITTRFQSDQ

SEQ ID NO: 100920 - protein, 19 aa, synthetic construct
  source 1..19: note = Seed: SELVIGAVILRGHLRIAGH
SELCIGEVFLRVHLRIAGH

SEQ ID NO: 100921 - protein, 19 aa, synthetic construct
  source 1..19: note = Seed: SFRLFARTRSMWSFNPETN
SFRLFARTFSMASFNPLTN

SEQ ID NO: 100922 - protein, 19 aa, synthetic construct
  source 1..19: note = Seed: SELVIGAVILRGHLRIAGH
SELFIGYVYLRLHLRIAGH

SEQ ID NO: 100923 - protein, 19 aa, synthetic construct
  source 1..19: note = Seed: VEAEVQIDRLITGRLQSLQ
VEAEVQIDRFITVRWQSSQ

SEQ ID NO: 100924 - protein, 19 aa, synthetic construct
  source 1..19: note = Seed: VEAEVQIDRLITGRLQSLQ
VEAEVQIDRFITIRFQSPQ

SEQ ID NO: 100925 - protein, 19 aa, synthetic construct
  source 1..19: note = Seed: VEAEVQIDRLITGRLQSLQ
VEAEYQITRFITTRLQSLQ

SEQ ID NO: 100926 - protein, 19 aa, synthetic construct
  source 1..19: note = Seed: SELVIGAVILRGHLRIAGH
SELRIGSVFLRIHLRIAGH

SEQ ID NO: 100927 - protein, 19 aa, synthetic construct
  source 1..19: note = Seed: VEAEVQIDRLITGRLQSLQ
VEAEVQIDRMITIRFQSIQ

SEQ ID NO: 100928 - protein, 19 aa, synthetic construct
  source 1..19: note = Seed: VEAEVQIDRLITGRLQSLQ
VEAEYQISRFITTRLQSLQ

SEQ ID NO: 100929 - protein, 19 aa, synthetic construct
  source 1..19: note = Seed: VEAEVQIDRLITGRLQSLQ
VEAEVQIDRFITSRYQSFQ

SEQ ID NO: 100930 - protein, 19 aa, synthetic construct
  source 1..19: note = Seed: VEAEVQIDRLITGRLQSLQ
VEAEVQIDRFITVRFQSHQ

SEQ ID NO: 100931 - protein, 19 aa, synthetic construct
  source 1..19: note = Seed: VEAEVQIDRLITGRLQSLQ
VEAEVQIDRFITARYQSFQ

SEQ ID NO: 100932 - protein, 19 aa, synthetic construct
  source 1..19: note = Seed: VEAEVQIDRLITGRLQSLQ
VEAEVQIDRIITFRFQSVQ

SEQ ID NO: 100933 - protein, 19 aa, synthetic construct
  source 1..19: note = Seed: VEAEVQIDRLITGRLQSLQ
VEAELQIRRNITRRLQSLQ

SEQ ID NO: 100934 - protein, 19 aa, synthetic construct
  source 1..19: note = Seed: VEAEVQIDRLITGRLQSLQ
VEAEFQITRFITNRLQSLQ

SEQ ID NO: 100935 - protein, 19 aa, synthetic construct
  source 1..19: note = Seed: VEAEVQIDRLITGRLQSLQ
VEAEWQIERFITTRLQSLQ

SEQ ID NO: 100936 - protein, 19 aa, synthetic construct
  source 1..19: note = Seed: VEAEVQIDRLITGRLQSLQ
VEAEVQIDRFITFRWQSVQ

SEQ ID NO: 100937 - protein, 19 aa, synthetic construct
  source 1..19: note = Seed: VEAEVQIDRLITGRLQSLQ
VEAEIQITRFITTRLQSLQ

SEQ ID NO: 100938 - protein, 19 aa, synthetic construct
  source 1..19: note = Seed: VEAEVQIDRLITGRLQSLQ
VEAEVQIDRFITFRWQSFQ

SEQ ID NO: 100939 - protein, 19 aa, synthetic construct
  source 1..19: note = Seed: VEAEVQIDRLITGRLQSLQ
VEAEVQIDRFITYRFQSFQ

SEQ ID NO: 100940 - protein, 19 aa, synthetic construct
  source 1..19: note = Seed: VEAEVQIDRLITGRLQSLQ
VEAEFQITRFITARLQSLQ

SEQ ID NO: 100941 - protein, 19 aa, synthetic construct
  source 1..19: note = Seed: VEAEVQIDRLITGRLQSLQ
VEAEVQIDRFITHRYQSLQ

SEQ ID NO: 100942 - protein, 19 aa, synthetic construct
  source 1..19: note = Seed: VEAEVQIDRLITGRLQSLQ
VEAEVQIDRFITVRLQSIQ

SEQ ID NO: 100943 - protein, 19 aa, synthetic construct
  source 1..19: note = Seed: VEAEVQIDRLITGRLQSLQ
VEAEYQIERFITTRLQSLQ

SEQ ID NO: 100944 - protein, 19 aa, synthetic construct
  source 1..19: note = Seed: VEAEVQIDRLITGRLQSLQ
VEAEVQIDRFITMRFQSNQ

SEQ ID NO: 100945 - protein, 19 aa, synthetic construct
  source 1..19: note = Seed: VEAEVQIDRLITGRLQSLQ
VEAEVQIDRFITHRLQSLQ

SEQ ID NO: 100946 - protein, 19 aa, synthetic construct
  source 1..19: note = Seed: VEAEVQIDRLITGRLQSLQ
VEAEVQIDRWITHRFQSIQ

SEQ ID NO: 100947 - protein, 19 aa, synthetic construct
  source 1..19: note = Seed: VEAEVQIDRLITGRLQSLQ
VEAEVQIDRFITMRWQSVQ

SEQ ID NO: 100948 - protein, 19 aa, synthetic construct
  source 1..19: note = Seed: VEAEVQIDRLITGRLQSLQ
VEAEVQIDRFITMRWQSIQ

SEQ ID NO: 100949 - protein, 19 aa, synthetic construct
  source 1..19: note = Seed: VEAEVQIDRLITGRLQSLQ
VEAEVQIDRFITIRYQSTQ

SEQ ID NO: 100950 - protein, 19 aa, synthetic construct
  source 1..19: note = Seed: VEAEVQIDRLITGRLQSLQ
VEAEFQIHRFITSRLQSLQ

SEQ ID NO: 100951 - protein, 19 aa, synthetic construct
  source 1..19: note = Seed: SFRLFARTRSMWSFNPETN
SFRLFARTRSLWSTNFETF

SEQ ID NO: 100952 - protein, 19 aa, synthetic construct
  source 1..19: note = Seed: VEAEVQIDRLITGRLQSLQ
VEAEYQIQRFITTRLQSLQ

SEQ ID NO: 100953 - protein, 19 aa, synthetic construct
  source 1..19: note = Seed: VEAEVQIDRLITGRLQSLQ
VEAEIQIERFITTRLQSLQ

SEQ ID NO: 100954 - protein, 19 aa, synthetic construct
  source 1..19: note = Seed: VEAEVQIDRLITGRLQSLQ
VEAEVQIDRIITQRFQSVQ

SEQ ID NO: 100955 - protein, 19 aa, synthetic construct
  source 1..19: note = Seed: VEAEVQIDRLITGRLQSLQ
VEAEFQIERFITERLQSLQ

SEQ ID NO: 100956 - protein, 19 aa, synthetic construct
  source 1..19: note = Seed: VEAEVQIDRLITGRLQSLQ
VEAEVQIDRMITIRFQSLQ

SEQ ID NO: 100957 - protein, 19 aa, synthetic construct
  source 1..19: note = Seed: VEAEVQIDRLITGRLQSLQ
VEAEVQIDRFITIRLQSEQ

SEQ ID NO: 100958 - protein, 19 aa, synthetic construct
  source 1..19: note = Seed: VEAEVQIDRLITGRLQSLQ
VEAEFQIERFITLRLQSLQ

SEQ ID NO: 100959 - protein, 19 aa, synthetic construct
  source 1..19: note = Seed: VEAEVQIDRLITGRLQSLQ
VEAEVQIDRFITHRLQSIQ

SEQ ID NO: 100960 - protein, 19 aa, synthetic construct
  source 1..19: note = Seed: VEAEVQIDRLITGRLQSLQ
VEAEFQIERFITARLQSLQ

SEQ ID NO: 100961 - protein, 19 aa, synthetic construct
  source 1..19: note = Seed: VEAEVQIDRLITGRLQSLQ
VEAEFQIARFITERLQSLQ

SEQ ID NO: 100962 - protein, 19 aa, synthetic construct
  source 1..19: note = Seed: VEAEVQIDRLITGRLQSLQ
VEAEFQITRFITMRLQSLQ

SEQ ID NO: 100963 - protein, 19 aa, synthetic construct
  source 1..19: note = Seed: VEAEVQIDRLITGRLQSLQ
VEAEVQIDRLITIRFQSMQ

SEQ ID NO: 100964 - protein, 19 aa, synthetic construct
  source 1..19: note = Seed: VEAEVQIDRLITGRLQSLQ
VEAEYQISRFITVRLQSLQ

SEQ ID NO: 100965 - protein, 19 aa, synthetic construct
  source 1..19: note = Seed: VEAEVQIDRLITGRLQSLQ
VEAEFQIERFITHRLQSLQ

SEQ ID NO: 100966 - protein, 19 aa, synthetic construct
  source 1..19: note = Seed: VKDCVVLHSYFTSDYYQLY
VKDCVVLHSFFTADMYQIY

SEQ ID NO: 100967 - protein, 19 aa, synthetic construct
  source 1..19: note = Seed: VEAEVQIDRLITGRLQSLQ
VEAEVQIDRWITHRFQSVQ

SEQ ID NO: 100968 - protein, 19 aa, synthetic construct
  source 1..19: note = Seed: VEAEVQIDRLITGRLQSLQ
VEAEFQIQRFITSRLQSLQ

SEQ ID NO: 100969 - protein, 19 aa, synthetic construct
  source 1..19: note = Seed: SELVIGAVILRGHLRIAGH
SELMIGYVFLREHLRIAGH

SEQ ID NO: 100970 - protein, 19 aa, synthetic construct
  source 1..19: note = Seed: VEAEVQIDRLITGRLQSLQ
VEAEVQIDRFITFRVQSLQ

SEQ ID NO: 100971 - protein, 19 aa, synthetic construct
  source 1..19: note = Seed: VEAEVQIDRLITGRLQSLQ
VEAEVQIDRFITTRLQSMQ

SEQ ID NO: 100972 - protein, 19 aa, synthetic construct
  source 1..19: note = Seed: VEAEVQIDRLITGRLQSLQ
VEAEFQIARFITSRLQSLQ

SEQ ID NO: 100973 - protein, 19 aa, synthetic construct
  source 1..19: note = Seed: SFRLFARTRSMWSFNPETN
SFRLFARTFSMVSFNPFTN

SEQ ID NO: 100974 - protein, 19 aa, synthetic construct
  source 1..19: note = Seed: SELVIGAVILRGHLRIAGH
SELCIGEVFLRIHLRIAGH

SEQ ID NO: 100975 - protein, 19 aa, synthetic construct
  source 1..19: note = Seed: VEAEVQIDRLITGRLQSLQ
VEAEVQIDRFITTRIQSFQ

SEQ ID NO: 100976 - protein, 19 aa, synthetic construct
  source 1..19: note = Seed: VEAEVQIDRLITGRLQSLQ
VEAEVQIDRFITHRFQSSQ

SEQ ID NO: 100977 - protein, 19 aa, synthetic construct
  source 1..19: note = Seed: VEAEVQIDRLITGRLQSLQ
VEAEVQIDRFITMRLQSVQ

SEQ ID NO: 100978 - protein, 19 aa, synthetic construct
  source 1..19: note = Seed: VEAEVQIDRLITGRLQSLQ
VEAEVQIDRFITHRWQSLQ

SEQ ID NO: 100979 - protein, 19 aa, synthetic construct
  source 1..19: note = Seed: VEAEVQIDRLITGRLQSLQ
VEAEFQISRFITHRLQSLQ

SEQ ID NO: 100980 - protein, 19 aa, synthetic construct
  source 1..19: note = Seed: VEAEVQIDRLITGRLQSLQ
VEAEVQIDRFITARIQSLQ

SEQ ID NO: 100981 - protein, 19 aa, synthetic construct
  source 1..19: note = Seed: VEAEVQIDRLITGRLQSLQ
VEAEVQIDRFITIRFQSGQ

SEQ ID NO: 100982 - protein, 19 aa, synthetic construct
  source 1..19: note = Seed: SELVIGAVILRGHLRIAGH
SELFIGHVWLRMHLRIAGH

SEQ ID NO: 100983 - protein, 19 aa, synthetic construct
  source 1..19: note = Seed: VEAEVQIDRLITGRLQSLQ
VEAEVQIDRFITMRFQSSQ

SEQ ID NO: 100984 - protein, 19 aa, synthetic construct
  source 1..19: note = Seed: VEAEVQIDRLITGRLQSLQ
VEAEVQIDRFITSRFQSDQ

SEQ ID NO: 100985 - protein, 19 aa, synthetic construct
  source 1..19: note = Seed: VKDCVVLHSYFTSDYYQLY
VKDCVVLHSLFTMDFYQLY

SEQ ID NO: 100986 - protein, 19 aa, synthetic construct
  source 1..19: note = Seed: VEAEVQIDRLITGRLQSLQ
VEAEFQIHRFITERLQSLQ

SEQ ID NO: 100987 - protein, 19 aa, synthetic construct
  source 1..19: note = Seed: VEAEVQIDRLITGRLQSLQ
VEAEVQIDRFITSRIQSIQ

SEQ ID NO: 100988 - protein, 19 aa, synthetic construct
  source 1..19: note = Seed: SELVIGAVILRGHLRIAGH
SELFIGSVFLRKHLRIAGH

SEQ ID NO: 100989 - protein, 19 aa, synthetic construct
  source 1..19: note = Seed: SELVIGAVILRGHLRIAGH
SELCIGTVFLRMHLRIAGH

SEQ ID NO: 100990 - protein, 19 aa, synthetic construct
  source 1..19: note = Seed: VEAEVQIDRLITGRLQSLQ
VEAEWQIERFITSRLQSLQ

SEQ ID NO: 100991 - protein, 19 aa, synthetic construct
  source 1..19: note = Seed: SELVIGAVILRGHLRIAGH
SELMIGFVFLREHLRIAGH

SEQ ID NO: 100992 - protein, 19 aa, synthetic construct
  source 1..19: note = Seed: VEAEVQIDRLITGRLQSLQ
VEAEVQIDRFITARLQSFQ

SEQ ID NO: 100993 - protein, 19 aa, synthetic construct
  source 1..19: note = Seed: VKDCVVLHSYFTSDYYQLY
VKDCVVLHSLFTLDYYQVY

SEQ ID NO: 100994 - protein, 19 aa, synthetic construct
  source 1..19: note = Seed: VEAEVQIDRLITGRLQSLQ
VEAEYQIARFITTRLQSLQ

SEQ ID NO: 100995 - protein, 19 aa, synthetic construct
  source 1..19: note = Seed: VEAEVQIDRLITGRLQSLQ
VEAEVQIDRFITTRWQSMQ

SEQ ID NO: 100996 - protein, 19 aa, synthetic construct
  source 1..19: note = Seed: VEAEVQIDRLITGRLQSLQ
VEAEVQIDRFITWRFQSFQ

SEQ ID NO: 100997 - protein, 19 aa, synthetic construct
  source 1..19: note = Seed: VEAEVQIDRLITGRLQSLQ
VEAEVQIDRFITLRWQSLQ

SEQ ID NO: 100998 - protein, 19 aa, synthetic construct
  source 1..19: note = Seed: VEAEVQIDRLITGRLQSLQ
VEAEVQIDRFITFRLQSIQ

SEQ ID NO: 100999 - protein, 19 aa, synthetic construct
  source 1..19: note = Seed: VEAEVQIDRLITGRLQSLQ
VEAELQISRFITVRLQSLQ

SEQ ID NO: 101000 - protein, 19 aa, synthetic construct
  source 1..19: note = Seed: SELVIGAVILRGHLRIAGH
SELHIGTVFLRIHLRIAGH

SEQ ID NO: 101001 - protein, 19 aa, synthetic construct
  source 1..19: note = Seed: VEAEVQIDRLITGRLQSLQ
VEAEVQIDRFITHRLQSVQ

SEQ ID NO: 101002 - protein, 19 aa, synthetic construct
  source 1..19: note = Seed: VEAEVQIDRLITGRLQSLQ
VEAEVQIDRIITFRFQSIQ

SEQ ID NO: 101003 - protein, 19 aa, synthetic construct
  source 1..19: note = Seed: VEAEVQIDRLITGRLQSLQ
VEAEFQIARFITVRLQSLQ

SEQ ID NO: 101004 - protein, 19 aa, synthetic construct
  source 1..19: note = Seed: VEAEVQIDRLITGRLQSLQ
VEAEVQIDRFITMRFQSEQ

SEQ ID NO: 101005 - protein, 19 aa, synthetic construct
  source 1..19: note = Seed: SELVIGAVILRGHLRIAGH
SELYIGHVFLRTHLRIAGH

SEQ ID NO: 101006 - protein, 19 aa, synthetic construct
  source 1..19: note = Seed: VEAEVQIDRLITGRLQSLQ
VEAEVQIDRFITNRLQSLQ

SEQ ID NO: 101007 - protein, 19 aa, synthetic construct
  source 1..19: note = Seed: VEAEVQIDRLITGRLQSLQ
VEAEYQIERFITVRLQSLQ

SEQ ID NO: 101008 - protein, 19 aa, synthetic construct
  source 1..19: note = Seed: VEAEVQIDRLITGRLQSLQ
VEAEVQIDRFITGRFQSFQ

SEQ ID NO: 101009 - protein, 19 aa, synthetic construct
  source 1..19: note = Seed: VEAEVQIDRLITGRLQSLQ
VEAELQISRFITSRLQSLQ

SEQ ID NO: 101010 - protein, 19 aa, synthetic construct
  source 1..19: note = Seed: SELVIGAVILRGHLRIAGH
SELVIGAVIIRGHLRIARH

SEQ ID NO: 101011 - protein, 19 aa, synthetic construct
  source 1..19: note = Seed: VEAEVQIDRLITGRLQSLQ
VEAEIQITRFITSRLQSLQ

SEQ ID NO: 101012 - protein, 19 aa, synthetic construct
  source 1..19: note = Seed: VEAEVQIDRLITGRLQSLQ
VEAEVQIDRFITHRYQSVQ

SEQ ID NO: 101013 - protein, 19 aa, synthetic construct
  source 1..19: note = Seed: SFRLFARTRSMWSFNPETN
SFRLFARTFSMTSFNPFTN

SEQ ID NO: 101014 - protein, 19 aa, synthetic construct
  source 1..19: note = Seed: VEAEVQIDRLITGRLQSLQ
VEAEVQIDRFITIRFQSQQ

SEQ ID NO: 101015 - protein, 19 aa, synthetic construct
  source 1..19: note = Seed: VEAEVQIDRLITGRLQSLQ
VEAEFQISRFITFRLQSLQ

SEQ ID NO: 101016 - protein, 19 aa, synthetic construct
  source 1..19: note = Seed: VEAEVQIDRLITGRLQSLQ
VEAEVQIDRWITMRFQSVQ

SEQ ID NO: 101017 - protein, 19 aa, synthetic construct
  source 1..19: note = Seed: VEAEVQIDRLITGRLQSLQ
VEAELQITRFITSRLQSLQ

SEQ ID NO: 101018 - protein, 19 aa, synthetic construct
  source 1..19: note = Seed: VEAEVQIDRLITGRLQSLQ
VEAEFQIARFITHRLQSLQ

SEQ ID NO: 101019 - protein, 19 aa, synthetic construct
  source 1..19: note = Seed: VEAEVQIDRLITGRLQSLQ
VEAEVQIDRFITARIQSIQ

SEQ ID NO: 101020 - protein, 19 aa, synthetic construct
  source 1..19: note = Seed: VEAEVQIDRLITGRLQSLQ
VEAEFQIIRFITSRLQSLQ

SEQ ID NO: 101021 - protein, 19 aa, synthetic construct
  source 1..19: note = Seed: VEAEVQIDRLITGRLQSLQ
VEAEFQINRFITSRLQSLQ

SEQ ID NO: 101022 - protein, 19 aa, synthetic construct
  source 1..19: note = Seed: VEAEVQIDRLITGRLQSLQ
VEAEVQIDRWITTRFQSFQ

SEQ ID NO: 101023 - protein, 19 aa, synthetic construct
  source 1..19: note = Seed: VEAEVQIDRLITGRLQSLQ
VEAEFQIQRFITERLQSLQ

SEQ ID NO: 101024 - protein, 19 aa, synthetic construct
  source 1..19: note = Seed: VEAEVQIDRLITGRLQSLQ
VEAEFQIVRFITTRLQSLQ

SEQ ID NO: 101025 - protein, 19 aa, synthetic construct
  source 1..19: note = Seed: SELVIGAVILRGHLRIAGH
SELFIGFVFLRYHLRIAGH

SEQ ID NO: 101026 - protein, 19 aa, synthetic construct
  source 1..19: note = Seed: VEAEVQIDRLITGRLQSLQ
VEAEVQIDRFITTRWQSFQ

SEQ ID NO: 101027 - protein, 19 aa, synthetic construct
  source 1..19: note = Seed: SELVIGAVILRGHLRIAGH
SELCIGHVFLRIHLRIAGH

SEQ ID NO: 101028 - protein, 19 aa, synthetic construct
  source 1..19: note = Seed: VEAEVQIDRLITGRLQSLQ
VEAEVQIDRFITRRFQSLQ

SEQ ID NO: 101029 - protein, 19 aa, synthetic construct
  source 1..19: note = Seed: VEAEVQIDRLITGRLQSLQ
VEAEVQIDRFITIRYQSYQ

SEQ ID NO: 101030 - protein, 19 aa, synthetic construct
  source 1..19: note = Seed: VEAEVQIDRLITGRLQSLQ
VEAEFQIERFITMRLQSLQ

SEQ ID NO: 101031 - protein, 19 aa, synthetic construct
  source 1..19: note = Seed: VEAEVQIDRLITGRLQSLQ
VEAEVQIDRYITFRFQSMQ

SEQ ID NO: 101032 - protein, 19 aa, synthetic construct
  source 1..19: note = Seed: VEAEVQIDRLITGRLQSLQ
VEAEMQIERFITSRLQSLQ

SEQ ID NO: 101033 - protein, 19 aa, synthetic construct
  source 1..19: note = Seed: VEAEVQIDRLITGRLQSLQ
VEAEVQIDRFITSRIQSVQ

SEQ ID NO: 101034 - protein, 19 aa, synthetic construct
  source 1..19: note = Seed: SFRLFARTRSMWSFNPETN
SFRLFARTFSMASFNPFTN

SEQ ID NO: 101035 - protein, 19 aa, synthetic construct
  source 1..19: note = Seed: VEAEVQIDRLITGRLQSLQ
VEAEVQIDRMITFRFQSVQ

SEQ ID NO: 101036 - protein, 19 aa, synthetic construct
  source 1..19: note = Seed: VEAEVQIDRLITGRLQSLQ
VEAEYQIKRFITARLQSLQ

SEQ ID NO: 101037 - protein, 19 aa, synthetic construct
  source 1..19: note = Seed: SFRLFARTRSMWSFNPETN
SFRLFARTFSMLSFNPLTN

SEQ ID NO: 101038 - protein, 19 aa, synthetic construct
  source 1..19: note = Seed: SELVIGAVILRGHLRIAGH
SELVIGAVILRGHLRIARH

SEQ ID NO: 101039 - protein, 19 aa, synthetic construct
  source 1..19: note = Seed: SFRLFARTRSMWSFNPETN
SFRLFARTFSMASFNPVTN

SEQ ID NO: 101040 - protein, 19 aa, synthetic construct
  source 1..19: note = Seed: VEAEVQIDRLITGRLQSLQ
VEAEVQIDRFITARMQSVQ

SEQ ID NO: 101041 - protein, 19 aa, synthetic construct
  source 1..19: note = Seed: VEAEVQIDRLITGRLQSLQ
VEAEVQIDRFITFRLQSLQ

SEQ ID NO: 101042 - protein, 19 aa, synthetic construct
  source 1..19: note = Seed: VEAEVQIDRLITGRLQSLQ
VEAEFQIKRFITARLQSLQ

SEQ ID NO: 101043 - protein, 19 aa, synthetic construct
  source 1..19: note = Seed: VEAEVQIDRLITGRLQSLQ
VEAEFQIARFITIRLQSLQ

SEQ ID NO: 101044 - protein, 19 aa, synthetic construct
  source 1..19: note = Seed: VEAEVQIDRLITGRLQSLQ
VEAELQIERFITVRLQSLQ

SEQ ID NO: 101045 - protein, 19 aa, synthetic construct
  source 1..19: note = Seed: SELVIGAVILRGHLRIAGH
SELFIGFVYLRVHLRIAGH

SEQ ID NO: 101046 - protein, 19 aa, synthetic construct
  source 1..19: note = Seed: VEAEVQIDRLITGRLQSLQ
VEAEVQIDRYITLRFQSFQ

SEQ ID NO: 101047 - protein, 19 aa, synthetic construct
  source 1..19: note = Seed: VEAEVQIDRLITGRLQSLQ
VEAEFQIERFITNRLQSLQ

SEQ ID NO: 101048 - protein, 19 aa, synthetic construct
  source 1..19: note = Seed: VEAEVQIDRLITGRLQSLQ
VEAELQITRFITVRLQSLQ

SEQ ID NO: 101049 - protein, 19 aa, synthetic construct
  source 1..19: note = Seed: VEAEVQIDRLITGRLQSLQ
VEAELQIHRFITVRLQSLQ

SEQ ID NO: 101050 - protein, 19 aa, synthetic construct
  source 1..19: note = Seed: VEAEVQIDRLITGRLQSLQ
VEAEWQITRFITSRLQSLQ

SEQ ID NO: 101051 - protein, 19 aa, synthetic construct
  source 1..19: note = Seed: SELVIGAVILRGHLRIAGH
SELVIGAVFLREHFRIVGH

SEQ ID NO: 101052 - protein, 19 aa, synthetic construct
  source 1..19: note = Seed: SELVIGAVILRGHLRIAGH
SELFIGTVWLRHHLRIAGH

SEQ ID NO: 101053 - protein, 19 aa, synthetic construct
  source 1..19: note = Seed: VEAEVQIDRLITGRLQSLQ
VEAEFQIDRFITTRLQSLQ

SEQ ID NO: 101054 - protein, 19 aa, synthetic construct
  source 1..19: note = Seed: VEAEVQIDRLITGRLQSLQ
VEAEVQIDRYITIRYQSIQ

SEQ ID NO: 101055 - protein, 19 aa, synthetic construct
  source 1..19: note = Seed: SELVIGAVILRGHLRIAGH
SELCIGFVLLRMHLRIAGH

SEQ ID NO: 101056 - protein, 19 aa, synthetic construct
  source 1..19: note = Seed: VEAEVQIDRLITGRLQSLQ
VEAEVQIDRFITSRMQSIQ

SEQ ID NO: 101057 - protein, 19 aa, synthetic construct
  source 1..19: note = Seed: VEAEVQIDRLITGRLQSLQ
VEAEFQIERFITFRLQSLQ

SEQ ID NO: 101058 - protein, 19 aa, synthetic construct
  source 1..19: note = Seed: VEAEVQIDRLITGRLQSLQ
VEAEYQISRFITERLQSLQ

SEQ ID NO: 101059 - protein, 19 aa, synthetic construct
  source 1..19: note = Seed: SELVIGAVILRGHLRIAGH
SELCIGDVFLRIHLRIAGH

SEQ ID NO: 101060 - protein, 19 aa, synthetic construct
  source 1..19: note = Seed: VEAEVQIDRLITGRLQSLQ
VEAEVQIDRFITFRIQSVQ

SEQ ID NO: 101061 - protein, 19 aa, synthetic construct
  source 1..19: note = Seed: SELVIGAVILRGHLRIAGH
SELCIGTVFLRYHLRIAGH

SEQ ID NO: 101062 - protein, 19 aa, synthetic construct
  source 1..19: note = Seed: VEAEVQIDRLITGRLQSLQ
VEAEVQIDRFITERWQSLQ

SEQ ID NO: 101063 - protein, 19 aa, synthetic construct
  source 1..19: note = Seed: VEAEVQIDRLITGRLQSLQ
VEAEVQIDRFITSRWQSFQ

SEQ ID NO: 101064 - protein, 19 aa, synthetic construct
  source 1..19: note = Seed: VEAEVQIDRLITGRLQSLQ
VEAEVQIDRFITIRFQSRQ

SEQ ID NO: 101065 - protein, 19 aa, synthetic construct
  source 1..19: note = Seed: VEAEVQIDRLITGRLQSLQ
VEAEFQINRFITARLQSLQ

SEQ ID NO: 101066 - protein, 19 aa, synthetic construct
  source 1..19: note = Seed: VEAEVQIDRLITGRLQSLQ
VEAEFQITRFITFRLQSLQ

SEQ ID NO: 101067 - protein, 19 aa, synthetic construct
  source 1..19: note = Seed: VEAEVQIDRLITGRLQSLQ
VEAEFQINRFITIRLQSLQ

SEQ ID NO: 101068 - protein, 19 aa, synthetic construct
  source 1..19: note = Seed: VEAEVQIDRLITGRLQSLQ
VEAEVQIDRFITARIQSVQ

SEQ ID NO: 101069 - protein, 19 aa, synthetic construct
  source 1..19: note = Seed: VEAEVQIDRLITGRLQSLQ
VEAEVQIDRFITRRFQSIQ

SEQ ID NO: 101070 - protein, 19 aa, synthetic construct
  source 1..19: note = Seed: SELVIGAVILRGHLRIAGH
SELRIGAVFLRIHLRIAGH

SEQ ID NO: 101071 - protein, 19 aa, synthetic construct
  source 1..19: note = Seed: SELVIGAVILRGHLRIAGH
SELFIGRVFLREHLRIAGH

SEQ ID NO: 101072 - protein, 19 aa, synthetic construct
  source 1..19: note = Seed: VEAEVQIDRLITGRLQSLQ
VEAEVQIDRFITYRFQSYQ

SEQ ID NO: 101073 - protein, 19 aa, synthetic construct
  source 1..19: note = Seed: SELVIGAVILRGHLRIAGH
SELVIGAVIMRGHLRIAYH

SEQ ID NO: 101074 - protein, 19 aa, synthetic construct
  source 1..19: note = Seed: VEAEVQIDRLITGRLQSLQ
VEAEVQIDRFITFRMQSIQ

SEQ ID NO: 101075 - protein, 19 aa, synthetic construct
  source 1..19: note = Seed: VEAEVQIDRLITGRLQSLQ
VEAEVQIDRFITHRIQSLQ

SEQ ID NO: 101076 - protein, 19 aa, synthetic construct
  source 1..19: note = Seed: VEAEVQIDRLITGRLQSLQ
VEAEVQIDRFITYRFQSAQ

SEQ ID NO: 101077 - protein, 19 aa, synthetic construct
  source 1..19: note = Seed: VEAEVQIDRLITGRLQSLQ
VEAEFQINRFITTRLQSLQ

SEQ ID NO: 101078 - protein, 19 aa, synthetic construct
  source 1..19: note = Seed: VEAEVQIDRLITGRLQSLQ
VEAEVQIDRLITIRYQSLQ

SEQ ID NO: 101079 - protein, 19 aa, synthetic construct
  source 1..19: note = Seed: SFRLFARTRSMWSFNPETN
SFRLFARTFSMSSFNPFTN

SEQ ID NO: 101080 - protein, 19 aa, synthetic construct
  source 1..19: note = Seed: VEAEVQIDRLITGRLQSLQ
VEAEVQIDRFITHRFQSNQ

SEQ ID NO: 101081 - protein, 19 aa, synthetic construct
  source 1..19: note = Seed: VEAEVQIDRLITGRLQSLQ
VEAEVQIDRLITIRFQSYQ

SEQ ID NO: 101082 - protein, 19 aa, synthetic construct
  source 1..19: note = Seed: VEAEVQIDRLITGRLQSLQ
VEAEVQIDRIITTRFQSYQ

SEQ ID NO: 101083 - protein, 19 aa, synthetic construct
  source 1..19: note = Seed: VEAEVQIDRLITGRLQSLQ
VEAEYQIIRFITSRLQSLQ

SEQ ID NO: 101084 - protein, 19 aa, synthetic construct
  source 1..19: note = Seed: VEAEVQIDRLITGRLQSLQ
VEAEVQIDRFITARLQSMQ

SEQ ID NO: 101085 - protein, 19 aa, synthetic construct
  source 1..19: note = Seed: SFRLFARTRSMWSFNPETN
SIRLMAKTRAMWSFNPETN

SEQ ID NO: 101086 - protein, 19 aa, synthetic construct
  source 1..19: note = Seed: VEAEVQIDRLITGRLQSLQ
VEAEVQIDRFITFRIQSLQ

SEQ ID NO: 101087 - protein, 19 aa, synthetic construct
  source 1..19: note = Seed: VEAEVQIDRLITGRLQSLQ
VEAELQIERFITARLQSLQ

SEQ ID NO: 101088 - protein, 19 aa, synthetic construct
  source 1..19: note = Seed: SELVIGAVILRGHLRIAGH
SELCIGHVFLRLHLRIAGH

SEQ ID NO: 101089 - protein, 19 aa, synthetic construct
  source 1..19: note = Seed: SELVIGAVILRGHLRIAGH
SELFIGEVFLRKHLRIAGH

SEQ ID NO: 101090 - protein, 19 aa, synthetic construct
  source 1..19: note = Seed: VEAEVQIDRLITGRLQSLQ
VEAEVQIDRFITVRFQSKQ

SEQ ID NO: 101091 - protein, 19 aa, synthetic construct
  source 1..19: note = Seed: SELVIGAVILRGHLRIAGH
SELMIGLVFLREHLRIAGH

SEQ ID NO: 101092 - protein, 19 aa, synthetic construct
  source 1..19: note = Seed: VEAEVQIDRLITGRLQSLQ
VEAEVQIDRYITLRFQSMQ

SEQ ID NO: 101093 - protein, 19 aa, synthetic construct
  source 1..19: note = Seed: SELVIGAVILRGHLRIAGH
SELCIGTVFLRFHLRIAGH

SEQ ID NO: 101094 - protein, 19 aa, synthetic construct
  source 1..19: note = Seed: VKDCVVLHSYFTSDYYQLY
VKDCVVLHSMFTMDFYQLY

SEQ ID NO: 101095 - protein, 19 aa, synthetic construct
  source 1..19: note = Seed: SELVIGAVILRGHLRIAGH
SELVIGTVFLRYHLRIAGH

SEQ ID NO: 101096 - protein, 19 aa, synthetic construct
  source 1..19: note = Seed: VEAEVQIDRLITGRLQSLQ
VEAEVQIDRLITVRFQSYQ

SEQ ID NO: 101097 - protein, 19 aa, synthetic construct
  source 1..19: note = Seed: VEAEVQIDRLITGRLQSLQ
VEAEYQIERFITERLQSLQ

SEQ ID NO: 101098 - protein, 19 aa, synthetic construct
  source 1..19: note = Seed: VEAEVQIDRLITGRLQSLQ
VEAELQISRFITTRLQSLQ

SEQ ID NO: 101099 - protein, 19 aa, synthetic construct
  source 1..19: note = Seed: VEAEVQIDRLITGRLQSLQ
VEAEVQIDRFITFRFQSRQ

SEQ ID NO: 101100 - protein, 19 aa, synthetic construct
  source 1..19: note = Seed: VEAEVQIDRLITGRLQSLQ
VEAEYQIVRFITSRLQSLQ

SEQ ID NO: 101101 - protein, 19 aa, synthetic construct
  source 1..19: note = Seed: VEAEVQIDRLITGRLQSLQ
VEAEVQIDRFITLRYQSFQ

SEQ ID NO: 101102 - protein, 19 aa, synthetic construct
  source 1..19: note = Seed: VEAEVQIDRLITGRLQSLQ
VEAELQITRFITARLQSLQ

SEQ ID NO: 101103 - protein, 19 aa, synthetic construct
  source 1..19: note = Seed: SELVIGAVILRGHLRIAGH
SELFIGLVYLREHLRIAGH

SEQ ID NO: 101104 - protein, 19 aa, synthetic construct
  source 1..19: note = Seed: VEAEVQIDRLITGRLQSLQ
VEAEIQIKRFITVRLQSLQ

SEQ ID NO: 101105 - protein, 19 aa, synthetic construct
  source 1..19: note = Seed: SELVIGAVILRGHLRIAGH
SELFIGIVYLRNHLRIAGH

SEQ ID NO: 101106 - protein, 19 aa, synthetic construct
  source 1..19: note = Seed: VEAEVQIDRLITGRLQSLQ
VEAEVQIDRFITIRYQSCQ

SEQ ID NO: 101107 - protein, 19 aa, synthetic construct
  source 1..19: note = Seed: VEAEVQIDRLITGRLQSLQ
VEAEVQIDRFITSRWQSMQ

SEQ ID NO: 101108 - protein, 19 aa, synthetic construct
  source 1..19: note = Seed: VEAEVQIDRLITGRLQSLQ
VEAEVQIDRFITARWQSMQ

SEQ ID NO: 101109 - protein, 19 aa, synthetic construct
  source 1..19: note = Seed: SELVIGAVILRGHLRIAGH
SELCIGTVYLRVHLRIAGH

SEQ ID NO: 101110 - protein, 19 aa, synthetic construct
  source 1..19: note = Seed: VEAEVQIDRLITGRLQSLQ
VEAEVQIDRFITVRFQSRQ

SEQ ID NO: 101111 - protein, 19 aa, synthetic construct
  source 1..19: note = Seed: SELVIGAVILRGHLRIAGH
SELFIGPVFLREHLRIAGH

SEQ ID NO: 101112 - protein, 19 aa, synthetic construct
  source 1..19: note = Seed: VEAEVQIDRLITGRLQSLQ
VEAEVQIDRFITTRLQSYQ

SEQ ID NO: 101113 - protein, 19 aa, synthetic construct
  source 1..19: note = Seed: VEAEVQIDRLITGRLQSLQ
VEAEVQIDRFITARFQSHQ

SEQ ID NO: 101114 - protein, 19 aa, synthetic construct
  source 1..19: note = Seed: VEAEVQIDRLITGRLQSLQ
VEAEVQIDRFITARFQSQQ

SEQ ID NO: 101115 - protein, 19 aa, synthetic construct
  source 1..19: note = Seed: VEAEVQIDRLITGRLQSLQ
VEAEVQIDRFITSRMQSVQ

SEQ ID NO: 101116 - protein, 19 aa, synthetic construct
  source 1..19: note = Seed: VEAEVQIDRLITGRLQSLQ
VEAEFQIFRFITHRLQSLQ

SEQ ID NO: 101117 - protein, 19 aa, synthetic construct
  source 1..19: note = Seed: SELVIGAVILRGHLRIAGH
SELMIGVVFLREHLRIAGH

SEQ ID NO: 101118 - protein, 19 aa, synthetic construct
  source 1..19: note = Seed: VEAEVQIDRLITGRLQSLQ
VEAEFQIGRFITVRLQSLQ

SEQ ID NO: 101119 - protein, 19 aa, synthetic construct
  source 1..19: note = Seed: VEAEVQIDRLITGRLQSLQ
VEAEVQIDRFITTRAQSLQ

SEQ ID NO: 101120 - protein, 19 aa, synthetic construct
  source 1..19: note = Seed: SELVIGAVILRGHLRIAGH
SELRIGSVFLRMHLRIAGH

SEQ ID NO: 101121 - protein, 19 aa, synthetic construct
  source 1..19: note = Seed: VEAEVQIDRLITGRLQSLQ
VEAEVQIDRFITLRWQSTQ

SEQ ID NO: 101122 - protein, 19 aa, synthetic construct
  source 1..19: note = Seed: VEAEVQIDRLITGRLQSLQ
VEAEVQIDRYITTRFQSTQ

SEQ ID NO: 101123 - protein, 19 aa, synthetic construct
  source 1..19: note = Seed: VEAEVQIDRLITGRLQSLQ
VEAEVQIDRFITNRFQSAQ

SEQ ID NO: 101124 - protein, 19 aa, synthetic construct
  source 1..19: note = Seed: VKDCVVLHSYFTSDYYQLY
VKDCVVLHSLFTYDFYQVY

SEQ ID NO: 101125 - protein, 19 aa, synthetic construct
  source 1..19: note = Seed: VEAEVQIDRLITGRLQSLQ
VEAEVQIDRFITIRYQSHQ

SEQ ID NO: 101126 - protein, 19 aa, synthetic construct
  source 1..19: note = Seed: VEAEVQIDRLITGRLQSLQ
VEAEWQIQRFITERLQSLQ

SEQ ID NO: 101127 - protein, 19 aa, synthetic construct
  source 1..19: note = Seed: VEAEVQIDRLITGRLQSLQ
VEAEVQIDRFITDRFQSFQ

SEQ ID NO: 101128 - protein, 19 aa, synthetic construct
  source 1..19: note = Seed: SELVIGAVILRGHLRIAGH
SELVIGQVFLREHLRIAGH

SEQ ID NO: 101129 - protein, 19 aa, synthetic construct
  source 1..19: note = Seed: VEAEVQIDRLITGRLQSLQ
VEAEFQIRRFITTRLQSLQ

SEQ ID NO: 101130 - protein, 19 aa, synthetic construct
  source 1..19: note = Seed: SFRLFARTRSMWSFNPETN
SFRLFARHRFMWVFNPETN

SEQ ID NO: 101131 - protein, 19 aa, synthetic construct
  source 1..19: note = Seed: VEAEVQIDRLITGRLQSLQ
VEAELQIHRFITARLQSLQ

SEQ ID NO: 101132 - protein, 19 aa, synthetic construct
  source 1..19: note = Seed: SELVIGAVILRGHLRIAGH
SELNIGTVFLRLHLRIAGH

SEQ ID NO: 101133 - protein, 19 aa, synthetic construct
  source 1..19: note = Seed: VEAEVQIDRLITGRLQSLQ
VEAEVQIDRFITNRIQSIQ

SEQ ID NO: 101134 - protein, 19 aa, synthetic construct
  source 1..19: note = Seed: VEAEVQIDRLITGRLQSLQ
VEAEWQIERFITIRLQSLQ

SEQ ID NO: 101135 - protein, 19 aa, synthetic construct
  source 1..19: note = Seed: VEAEVQIDRLITGRLQSLQ
VEAEFQINRFITLRLQSLQ

SEQ ID NO: 101136 - protein, 19 aa, synthetic construct
  source 1..19: note = Seed: VEAEVQIDRLITGRLQSLQ
VEAELQITRFITTRLQSLQ

SEQ ID NO: 101137 - protein, 19 aa, synthetic construct
  source 1..19: note = Seed: SFRLFARTRSMWSFNPETN
SFRLFARHRFMWIFNPETN

SEQ ID NO: 101138 - protein, 19 aa, synthetic construct
  source 1..19: note = Seed: VEAEVQIDRLITGRLQSLQ
VEAEVQIDRLITMRFQSFQ

SEQ ID NO: 101139 - protein, 19 aa, synthetic construct
  source 1..19: note = Seed: VEAEVQIDRLITGRLQSLQ
VEAEVQIDRFITTRIQSMQ

SEQ ID NO: 101140 - protein, 19 aa, synthetic construct
  source 1..19: note = Seed: VEAEVQIDRLITGRLQSLQ
VEAEMQIHRFITVRLQSLQ

SEQ ID NO: 101141 - protein, 19 aa, synthetic construct
  source 1..19: note = Seed: VEAEVQIDRLITGRLQSLQ
VEAEVQIDRFITTRYQSYQ

SEQ ID NO: 101142 - protein, 19 aa, synthetic construct
  source 1..19: note = Seed: VEAEVQIDRLITGRLQSLQ
VEAEVQIDRFITCRFQSFQ

SEQ ID NO: 101143 - protein, 19 aa, synthetic construct
  source 1..19: note = Seed: SELVIGAVILRGHLRIAGH
SELRIGSVFLRFHLRIAGH

SEQ ID NO: 101144 - protein, 19 aa, synthetic construct
  source 1..19: note = Seed: VEAEVQIDRLITGRLQSLQ
VEAEVQIDRYITHRFQSMQ

SEQ ID NO: 101145 - protein, 19 aa, synthetic construct
  source 1..19: note = Seed: VEAEVQIDRLITGRLQSLQ
VEAEYQIHRFITARLQSLQ

SEQ ID NO: 101146 - protein, 19 aa, synthetic construct
  source 1..19: note = Seed: VEAEVQIDRLITGRLQSLQ
VEAEVQIDRIITNRFQSVQ

SEQ ID NO: 101147 - protein, 19 aa, synthetic construct
  source 1..19: note = Seed: VEAEVQIDRLITGRLQSLQ
VEAEYQINRFITSRLQSLQ

SEQ ID NO: 101148 - protein, 19 aa, synthetic construct
  source 1..19: note = Seed: SELVIGAVILRGHLRIAGH
SELMIGIVFLREHLRIAGH

SEQ ID NO: 101149 - protein, 19 aa, synthetic construct
  source 1..19: note = Seed: SELVIGAVILRGHLRIAGH
SELVIGAVYLRSHFRIFGH

SEQ ID NO: 101150 - protein, 19 aa, synthetic construct
  source 1..19: note = Seed: VEAEVQIDRLITGRLQSLQ
VEAEVQIDRLITLRFQSMQ

SEQ ID NO: 101151 - protein, 19 aa, synthetic construct
  source 1..19: note = Seed: VEAEVQIDRLITGRLQSLQ
VEAEVQIDRFITMRLQSIQ

SEQ ID NO: 101152 - protein, 19 aa, synthetic construct
  source 1..19: note = Seed: VEAEVQIDRLITGRLQSLQ
VEAELQIQRFITARLQSLQ

SEQ ID NO: 101153 - protein, 19 aa, synthetic construct
  source 1..19: note = Seed: VEAEVQIDRLITGRLQSLQ
VEAEVQIDRLITFRFQSFQ

SEQ ID NO: 101154 - protein, 19 aa, synthetic construct
  source 1..19: note = Seed: VEAEVQIDRLITGRLQSLQ
VEAEVQIDRIITIRFQSYQ

SEQ ID NO: 101155 - protein, 19 aa, synthetic construct
  source 1..19: note = Seed: SELVIGAVILRGHLRIAGH
SELVIGWVFLREHLRIAGH

SEQ ID NO: 101156 - protein, 19 aa, synthetic construct
  source 1..19: note = Seed: VEAEVQIDRLITGRLQSLQ
VEAEWQITRFITARLQSLQ

SEQ ID NO: 101157 - protein, 19 aa, synthetic construct
  source 1..19: note = Seed: SELVIGAVILRGHLRIAGH
SELFIGNVMLRIHLRIAGH

SEQ ID NO: 101158 - protein, 19 aa, synthetic construct
  source 1..19: note = Seed: VEAEVQIDRLITGRLQSLQ
VEAERQITRFITARLQSLQ

SEQ ID NO: 101159 - protein, 19 aa, synthetic construct
  source 1..19: note = Seed: SELVIGAVILRGHLRIAGH
SELFIGVVFLRPHLRIAGH

SEQ ID NO: 101160 - protein, 19 aa, synthetic construct
  source 1..19: note = Seed: VEAEVQIDRLITGRLQSLQ
VEAEVQIDRYITFRFQSYQ

SEQ ID NO: 101161 - protein, 19 aa, synthetic construct
  source 1..19: note = Seed: VEAEVQIDRLITGRLQSLQ
VEAEVQIDRWITIRFQSFQ

SEQ ID NO: 101162 - protein, 19 aa, synthetic construct
  source 1..19: note = Seed: VEAEVQIDRLITGRLQSLQ
VEAEVQIDRYITVRLQSLQ

SEQ ID NO: 101163 - protein, 19 aa, synthetic construct
  source 1..19: note = Seed: VEAEVQIDRLITGRLQSLQ
VEAEVQIDRMITLRFQSLQ

SEQ ID NO: 101164 - protein, 19 aa, synthetic construct
  source 1..19: note = Seed: VEAEVQIDRLITGRLQSLQ
VEAEYQIQRFITARLQSLQ

SEQ ID NO: 101165 - protein, 19 aa, synthetic construct
  source 1..19: note = Seed: VEAEVQIDRLITGRLQSLQ
VEAEVQIDRFITVRYQSYQ

SEQ ID NO: 101166 - protein, 19 aa, synthetic construct
  source 1..19: note = Seed: VEAEVQIDRLITGRLQSLQ
VEAEVQIDRFITVRYQSHQ

SEQ ID NO: 101167 - protein, 19 aa, synthetic construct
  source 1..19: note = Seed: VEAEVQIDRLITGRLQSLQ
VEAEVQIDRFITERIQSLQ

SEQ ID NO: 101168 - protein, 19 aa, synthetic construct
  source 1..19: note = Seed: VEAEVQIDRLITGRLQSLQ
VEAEFQIPRFITERLQSLQ

SEQ ID NO: 101169 - protein, 19 aa, synthetic construct
  source 1..19: note = Seed: SELVIGAVILRGHLRIAGH
SELRIGTVYLRIHLRIAGH

SEQ ID NO: 101170 - protein, 19 aa, synthetic construct
  source 1..19: note = Seed: VEAEVQIDRLITGRLQSLQ
VEAEMQIQRFITTRLQSLQ

SEQ ID NO: 101171 - protein, 19 aa, synthetic construct
  source 1..19: note = Seed: VEAEVQIDRLITGRLQSLQ
VEAEVQIDRIITFRFQSMQ

SEQ ID NO: 101172 - protein, 19 aa, synthetic construct
  source 1..19: note = Seed: SELVIGAVILRGHLRIAGH
SELRIGSVFLRSHLRIAGH

SEQ ID NO: 101173 - protein, 19 aa, synthetic construct
  source 1..19: note = Seed: VEAEVQIDRLITGRLQSLQ
VEAEVQIDRFITFRFQSKQ

SEQ ID NO: 101174 - protein, 19 aa, synthetic construct
  source 1..19: note = Seed: VEAEVQIDRLITGRLQSLQ
VEAEVQIDRFITTRVQSVQ

SEQ ID NO: 101175 - protein, 19 aa, synthetic construct
  source 1..19: note = Seed: VEAEVQIDRLITGRLQSLQ
VEAEYQIHRFITFRLQSLQ

SEQ ID NO: 101176 - protein, 19 aa, synthetic construct
  source 1..19: note = Seed: SELVIGAVILRGHLRIAGH
SELVIGAVIIRGMLRIAHH

SEQ ID NO: 101177 - protein, 19 aa, synthetic construct
  source 1..19: note = Seed: SFRLFARTRSMWSFNPETN
SFRLFARTFSMFSFNPLTN

SEQ ID NO: 101178 - protein, 19 aa, synthetic construct
  source 1..19: note = Seed: VEAEVQIDRLITGRLQSLQ
VEAEVQIDRFITLRYQSYQ

SEQ ID NO: 101179 - protein, 19 aa, synthetic construct
  source 1..19: note = Seed: SELVIGAVILRGHLRIAGH
SELRIGDVFLRVHLRIAGH

SEQ ID NO: 101180 - protein, 19 aa, synthetic construct
  source 1..19: note = Seed: VEAEVQIDRLITGRLQSLQ
VEAEIQIKRFITLRLQSLQ

SEQ ID NO: 101181 - protein, 19 aa, synthetic construct
  source 1..19: note = Seed: VEAEVQIDRLITGRLQSLQ
VEAEVQIDRIITVRFQSYQ

SEQ ID NO: 101182 - protein, 19 aa, synthetic construct
  source 1..19: note = Seed: VEAEVQIDRLITGRLQSLQ
VEAEVQIDRFITVRYQSEQ

SEQ ID NO: 101183 - protein, 19 aa, synthetic construct
  source 1..19: note = Seed: VEAEVQIDRLITGRLQSLQ
VEAEVQIDRIITVRFQSFQ

SEQ ID NO: 101184 - protein, 19 aa, synthetic construct
  source 1..19: note = Seed: VEAEVQIDRLITGRLQSLQ
VEAEVQIDRFITFRYQSYQ

SEQ ID NO: 101185 - protein, 19 aa, synthetic construct
  source 1..19: note = Seed: VEAEVQIDRLITGRLQSLQ
VEAEFQIIRFITPRLQSLQ

SEQ ID NO: 101186 - protein, 19 aa, synthetic construct
  source 1..19: note = Seed: VEAEVQIDRLITGRLQSLQ
VEAEVQIDRLITLRFQSFQ

SEQ ID NO: 101187 - protein, 19 aa, synthetic construct
  source 1..19: note = Seed: VEAEVQIDRLITGRLQSLQ
VEAEVQIDRFITERIQSIQ

SEQ ID NO: 101188 - protein, 19 aa, synthetic construct
  source 1..19: note = Seed: SELVIGAVILRGHLRIAGH
SELFIGYVMLREHLRIAGH

SEQ ID NO: 101189 - protein, 19 aa, synthetic construct
  source 1..19: note = Seed: VEAEVQIDRLITGRLQSLQ
VEAEVQIDRFITLRFQSQQ

SEQ ID NO: 101190 - protein, 19 aa, synthetic construct
  source 1..19: note = Seed: SFRLFARTRSMWSFNPETN
SIRLIARTRAMWSFNPETN

SEQ ID NO: 101191 - protein, 19 aa, synthetic construct
  source 1..19: note = Seed: VEAEVQIDRLITGRLQSLQ
VEAEVQIDRWITVRFQSFQ

SEQ ID NO: 101192 - protein, 19 aa, synthetic construct
  source 1..19: note = Seed: SFRLFARTRSMWSFNPETN
SFRLFARHRFMWMFNPETN

SEQ ID NO: 101193 - protein, 19 aa, synthetic construct
  source 1..19: note = Seed: VEAEVQIDRLITGRLQSLQ
VEAEWQISRFITTRLQSLQ

SEQ ID NO: 101194 - protein, 19 aa, synthetic construct
  source 1..19: note = Seed: VEAEVQIDRLITGRLQSLQ
VEAEWQIQRFITARLQSLQ

SEQ ID NO: 101195 - protein, 19 aa, synthetic construct
  source 1..19: note = Seed: VEAEVQIDRLITGRLQSLQ
VEAEFQIFRFITNRLQSLQ

SEQ ID NO: 101196 - protein, 19 aa, synthetic construct
  source 1..19: note = Seed: VEAEVQIDRLITGRLQSLQ
VEAEVQIDRFITFRLQSEQ

SEQ ID NO: 101197 - protein, 19 aa, synthetic construct
  source 1..19: note = Seed: VEAEVQIDRLITGRLQSLQ
VEAEVQIDRLITFRFQSYQ

SEQ ID NO: 101198 - protein, 19 aa, synthetic construct
  source 1..19: note = Seed: SELVIGAVILRGHLRIAGH
SELRIGTVFLREHLRIAGH

SEQ ID NO: 101199 - protein, 19 aa, synthetic construct
  source 1..19: note = Seed: VEAEVQIDRLITGRLQSLQ
VEAEFQINRFITERLQSLQ

SEQ ID NO: 101200 - protein, 19 aa, synthetic construct
  source 1..19: note = Seed: VEAEVQIDRLITGRLQSLQ
VEAEVQIDRFITFRLQSMQ

SEQ ID NO: 101201 - protein, 19 aa, synthetic construct
  source 1..19: note = Seed: VEAEVQIDRLITGRLQSLQ
VEAEFQILRFITARLQSLQ

SEQ ID NO: 101202 - protein, 19 aa, synthetic construct
  source 1..19: note = Seed: VEAEVQIDRLITGRLQSLQ
VEAEVQIDRFITTRVQSMQ

SEQ ID NO: 101203 - protein, 19 aa, synthetic construct
  source 1..19: note = Seed: SELVIGAVILRGHLRIAGH
SELRIGDVFLRIHLRIAGH

SEQ ID NO: 101204 - protein, 19 aa, synthetic construct
  source 1..19: note = Seed: SELVIGAVILRGHLRIAGH
SELCIGNVFLRIHLRIAGH

SEQ ID NO: 101205 - protein, 19 aa, synthetic construct
  source 1..19: note = Seed: SFRLFARTRSMWSFNPETN
SFRLFARTRFMWIFNPETN

SEQ ID NO: 101206 - protein, 19 aa, synthetic construct
  source 1..19: note = Seed: VEAEVQIDRLITGRLQSLQ
VEAEYQIKRFITLRLQSLQ

SEQ ID NO: 101207 - protein, 19 aa, synthetic construct
  source 1..19: note = Seed: VEAEVQIDRLITGRLQSLQ
VEAEVQIDRFITQRLQSIQ

SEQ ID NO: 101208 - protein, 19 aa, synthetic construct
  source 1..19: note = Seed: SELVIGAVILRGHLRIAGH
SELFIGGVYLRFHLRIAGH

SEQ ID NO: 101209 - protein, 19 aa, synthetic construct
  source 1..19: note = Seed: VEAEVQIDRLITGRLQSLQ
VEAEVQIDRFITIRYQSEQ

SEQ ID NO: 101210 - protein, 19 aa, synthetic construct
  source 1..19: note = Seed: SFRLFARTRSMWSFNPETN
SFRLFARTFSMVSFNPYTN

SEQ ID NO: 101211 - protein, 19 aa, synthetic construct
  source 1..19: note = Seed: VEAEVQIDRLITGRLQSLQ
VEAEVQIDRFITYRWQSMQ

SEQ ID NO: 101212 - protein, 19 aa, synthetic construct
  source 1..19: note = Seed: VEAEVQIDRLITGRLQSLQ
VEAEVQIDRVITFRFQSLQ

SEQ ID NO: 101213 - protein, 19 aa, synthetic construct
  source 1..19: note = Seed: VEAEVQIDRLITGRLQSLQ
VEAEVQIDRFITQRWQSLQ

SEQ ID NO: 101214 - protein, 19 aa, synthetic construct
  source 1..19: note = Seed: SELVIGAVILRGHLRIAGH
SELFIGDVFLRPHLRIAGH

SEQ ID NO: 101215 - protein, 19 aa, synthetic construct
  source 1..19: note = Seed: VEAEVQIDRLITGRLQSLQ
VEAEVQIDRFITNRLQSVQ

SEQ ID NO: 101216 - protein, 19 aa, synthetic construct
  source 1..19: note = Seed: VEAEVQIDRLITGRLQSLQ
VEAEVQIDRFITERIQSFQ

SEQ ID NO: 101217 - protein, 19 aa, synthetic construct
  source 1..19: note = Seed: SFRLFARTRSMWSFNPETN
SFRLFARTFSMMSFNPITN

SEQ ID NO: 101218 - protein, 19 aa, synthetic construct
  source 1..19: note = Seed: VEAEVQIDRLITGRLQSLQ
VEAEVQIDRIITFRFQSYQ

SEQ ID NO: 101219 - protein, 19 aa, synthetic construct
  source 1..19: note = Seed: VEAEVQIDRLITGRLQSLQ
VEAEVQIDRFITMRWQSAQ

SEQ ID NO: 101220 - protein, 19 aa, synthetic construct
  source 1..19: note = Seed: VEAEVQIDRLITGRLQSLQ
VEAEVQIDRIITLRFQSMQ

SEQ ID NO: 101221 - protein, 19 aa, synthetic construct
  source 1..19: note = Seed: VEAEVQIDRLITGRLQSLQ
VEAERQISRFITTRLQSLQ

SEQ ID NO: 101222 - protein, 19 aa, synthetic construct
  source 1..19: note = Seed: VEAEVQIDRLITGRLQSLQ
VEAEVQIDRFITQRFQSNQ

SEQ ID NO: 101223 - protein, 19 aa, synthetic construct
  source 1..19: note = Seed: VEAEVQIDRLITGRLQSLQ
VEAEMQIQRFITLRLQSLQ

SEQ ID NO: 101224 - protein, 19 aa, synthetic construct
  source 1..19: note = Seed: VEAEVQIDRLITGRLQSLQ
VEAERQISRFITARLQSLQ

SEQ ID NO: 101225 - protein, 19 aa, synthetic construct
  source 1..19: note = Seed: SFRLFARTRSMWSFNPETN
SFRLFARFRYMWVFNPETN

SEQ ID NO: 101226 - protein, 19 aa, synthetic construct
  source 1..19: note = Seed: VEAEVQIDRLITGRLQSLQ
VEAEVQIDRFITQRLQSLQ

SEQ ID NO: 101227 - protein, 19 aa, synthetic construct
  source 1..19: note = Seed: VEAEVQIDRLITGRLQSLQ
VEAEVQIDRFITMRYQSYQ

SEQ ID NO: 101228 - protein, 19 aa, synthetic construct
  source 1..19: note = Seed: SELVIGAVILRGHLRIAGH
SELVIGAVIFRGALRIAHH

SEQ ID NO: 101229 - protein, 19 aa, synthetic construct
  source 1..19: note = Seed: VEAEVQIDRLITGRLQSLQ
VEAEVQIDRFITQRLQSVQ

SEQ ID NO: 101230 - protein, 19 aa, synthetic construct
  source 1..19: note = Seed: VEAEVQIDRLITGRLQSLQ
VEAELQIIRSITARLQSLQ

SEQ ID NO: 101231 - protein, 19 aa, synthetic construct
  source 1..19: note = Seed: VEAEVQIDRLITGRLQSLQ
VEAELQIIRRITHRLQSLQ

SEQ ID NO: 101232 - protein, 19 aa, synthetic construct
  source 1..19: note = Seed: SELVIGAVILRGHLRIAGH
SELFIGQVILRVHLRIAGH

SEQ ID NO: 101233 - protein, 19 aa, synthetic construct
  source 1..19: note = Seed: SELVIGAVILRGHLRIAGH
SELRIGSVFLREHLRIAGH

SEQ ID NO: 101234 - protein, 19 aa, synthetic construct
  source 1..19: note = Seed: VEAEVQIDRLITGRLQSLQ
VEAEFQIHRFITYRLQSLQ

SEQ ID NO: 101235 - protein, 19 aa, synthetic construct
  source 1..19: note = Seed: SFRLFARTRSMWSFNPETN
SFRLFARHRFMWLFNPETN

SEQ ID NO: 101236 - protein, 19 aa, synthetic construct
  source 1..19: note = Seed: VEAEVQIDRLITGRLQSLQ
VEAEVQIDRFITFRWQSYQ

SEQ ID NO: 101237 - protein, 19 aa, synthetic construct
  source 1..19: note = Seed: SELVIGAVILRGHLRIAGH
SELRIGDVFLRLHLRIAGH

SEQ ID NO: 101238 - protein, 19 aa, synthetic construct
  source 1..19: note = Seed: SELVIGAVILRGHLRIAGH
SELFIGDVYLRTHLRIAGH

SEQ ID NO: 101239 - protein, 19 aa, synthetic construct
  source 1..19: note = Seed: VEAEVQIDRLITGRLQSLQ
VEAEVQIDRFITERMQSIQ

SEQ ID NO: 101240 - protein, 19 aa, synthetic construct
  source 1..19: note = Seed: SELVIGAVILRGHLRIAGH
SELFIGDVYLRAHLRIAGH

SEQ ID NO: 101241 - protein, 19 aa, synthetic construct
  source 1..19: note = Seed: VEAEVQIDRLITGRLQSLQ
VEAEVQIDRIITFRFQSFQ

SEQ ID NO: 101242 - protein, 19 aa, synthetic construct
  source 1..19: note = Seed: VEAEVQIDRLITGRLQSLQ
VEAEMQIPRFITFRLQSLQ

SEQ ID NO: 101243 - protein, 19 aa, synthetic construct
  source 1..19: note = Seed: VKDCVVLHSYFTSDYYQLY
VKDCWVLHSFFTHDYYQLY

SEQ ID NO: 101244 - protein, 19 aa, synthetic construct
  source 1..19: note = Seed: VEAEVQIDRLITGRLQSLQ
VEAEVQIDRFITFRAQSIQ

SEQ ID NO: 101245 - protein, 19 aa, synthetic construct
  source 1..19: note = Seed: VEAEVQIDRLITGRLQSLQ
VEAEVQIDRVITMRFQSLQ

SEQ ID NO: 101246 - protein, 19 aa, synthetic construct
  source 1..19: note = Seed: VEAEVQIDRLITGRLQSLQ
VEAEFQIFRYITIRLQSLQ

SEQ ID NO: 101247 - protein, 19 aa, synthetic construct
  source 1..19: note = Seed: VEAEVQIDRLITGRLQSLQ
VEAEVQIDRFITFRAQSVQ

SEQ ID NO: 101248 - protein, 19 aa, synthetic construct
  source 1..19: note = Seed: VEAEVQIDRLITGRLQSLQ
VEAEVQIDRFITLRFQSCQ

SEQ ID NO: 101249 - protein, 19 aa, synthetic construct
  source 1..19: note = Seed: SELVIGAVILRGHLRIAGH
SELVIGAVYLRFHFRILGH

SEQ ID NO: 101250 - protein, 19 aa, synthetic construct
  source 1..19: note = Seed: SELVIGAVILRGHLRIAGH
SELRIGTVFLRYHLRIAGH

SEQ ID NO: 101251 - protein, 19 aa, synthetic construct
  source 1..19: note = Seed: SFRLFARTRSMWSFNPETN
SFRLFARTFSMISLNPLTN

SEQ ID NO: 101252 - protein, 19 aa, synthetic construct
  source 1..19: note = Seed: SELVIGAVILRGHLRIAGH
SELVIGTVFLRAHLRIAGH

SEQ ID NO: 101253 - protein, 19 aa, synthetic construct
  source 1..19: note = Seed: SELVIGAVILRGHLRIAGH
SELCIGTVFLREHLRIAGH

SEQ ID NO: 101254 - protein, 19 aa, synthetic construct
  source 1..19: note = Seed: VEAEVQIDRLITGRLQSLQ
VEAERQISRFITIRLQSLQ

SEQ ID NO: 101255 - protein, 19 aa, synthetic construct
  source 1..19: note = Seed: SELVIGAVILRGHLRIAGH
SELRIGTVYLRLHLRIAGH

SEQ ID NO: 101256 - protein, 19 aa, synthetic construct
  source 1..19: note = Seed: VEAEVQIDRLITGRLQSLQ
VEAEVQIDRLITLRYQSVQ

SEQ ID NO: 101257 - protein, 19 aa, synthetic construct
  source 1..19: note = Seed: VEAEVQIDRLITGRLQSLQ
VEAELQITRFITERLQSLQ

SEQ ID NO: 101258 - protein, 19 aa, synthetic construct
  source 1..19: note = Seed: SFRLFARTRSMWSFNPETN
SFRLFARTFSMTSYNPLTN

SEQ ID NO: 101259 - protein, 19 aa, synthetic construct
  source 1..19: note = Seed: VEAEVQIDRLITGRLQSLQ
VEAEVQIDRFITMRFQSCQ

SEQ ID NO: 101260 - protein, 19 aa, synthetic construct
  source 1..19: note = Seed: SELVIGAVILRGHLRIAGH
SELRIGAVFLRMHLRIAGH

SEQ ID NO: 101261 - protein, 19 aa, synthetic construct
  source 1..19: note = Seed: VEAEVQIDRLITGRLQSLQ
VEAEVQIDRFITFRLQSYQ

SEQ ID NO: 101262 - protein, 19 aa, synthetic construct
  source 1..19: note = Seed: SFRLFARTRSMWSFNPETN
SFRLFARERFMWLFNPETN

SEQ ID NO: 101263 - protein, 19 aa, synthetic construct
  source 1..19: note = Seed: VEAEVQIDRLITGRLQSLQ
VEAEVQIDRIITLRFQSTQ

SEQ ID NO: 101264 - protein, 19 aa, synthetic construct
  source 1..19: note = Seed: SELVIGAVILRGHLRIAGH
SELFIGPVFLRTHLRIAGH

SEQ ID NO: 101265 - protein, 19 aa, synthetic construct
  source 1..19: note = Seed: SELVIGAVILRGHLRIAGH
SELWIGEVFLRSHLRIAGH

SEQ ID NO: 101266 - protein, 19 aa, synthetic construct
  source 1..19: note = Seed: SFRLFARTRSMWSFNPETN
SFRLFARTYSMASFNPLTN

SEQ ID NO: 101267 - protein, 19 aa, synthetic construct
  source 1..19: note = Seed: SELVIGAVILRGHLRIAGH
SELRIGSVFLRAHLRIAGH

SEQ ID NO: 101268 - protein, 19 aa, synthetic construct
  source 1..19: note = Seed: SFRLFARTRSMWSFNPETN
SFRLYARFRYMWVFNPETN

SEQ ID NO: 101269 - protein, 19 aa, synthetic construct
  source 1..19: note = Seed: VEAEVQIDRLITGRLQSLQ
VEAEVQIDRLITMRFQSYQ

SEQ ID NO: 101270 - protein, 19 aa, synthetic construct
  source 1..19: note = Seed: VEAEVQIDRLITGRLQSLQ
VEAEMQISRFITSRLQSLQ

SEQ ID NO: 101271 - protein, 19 aa, synthetic construct
  source 1..19: note = Seed: VEAEVQIDRLITGRLQSLQ
VEAEVQIDRYITLRFQSYQ

SEQ ID NO: 101272 - protein, 19 aa, synthetic construct
  source 1..19: note = Seed: SFRLFARTRSMWSFNPETN
SFRLFARTFSMISWNPLTN

SEQ ID NO: 101273 - protein, 19 aa, synthetic construct
  source 1..19: note = Seed: VEAEVQIDRLITGRLQSLQ
VEAEYQINRFITIRLQSLQ

SEQ ID NO: 101274 - protein, 19 aa, synthetic construct
  source 1..19: note = Seed: VEAEVQIDRLITGRLQSLQ
VEAEVQIDRIITMRFQSMQ

SEQ ID NO: 101275 - protein, 19 aa, synthetic construct
  source 1..19: note = Seed: VEAEVQIDRLITGRLQSLQ
VEAEVQIDRFITHRIQSFQ

SEQ ID NO: 101276 - protein, 19 aa, synthetic construct
  source 1..19: note = Seed: VEAEVQIDRLITGRLQSLQ
VEAEFQIHRYITIRLQSLQ

SEQ ID NO: 101277 - protein, 19 aa, synthetic construct
  source 1..19: note = Seed: VEAEVQIDRLITGRLQSLQ
VEAEVQIDRFITERYQSFQ

SEQ ID NO: 101278 - protein, 19 aa, synthetic construct
  source 1..19: note = Seed: SELVIGAVILRGHLRIAGH
SELCIGSVYLRLHLRIAGH

SEQ ID NO: 101279 - protein, 19 aa, synthetic construct
  source 1..19: note = Seed: VEAEVQIDRLITGRLQSLQ
VEAEVQIDRFITNRMQSVQ

SEQ ID NO: 101280 - protein, 19 aa, synthetic construct
  source 1..19: note = Seed: VEAEVQIDRLITGRLQSLQ
VEAEVQIDRFITTRWQSYQ

SEQ ID NO: 101281 - protein, 19 aa, synthetic construct
  source 1..19: note = Seed: SELVIGAVILRGHLRIAGH
SELRIGSVYLRVHLRIAGH

SEQ ID NO: 101282 - protein, 19 aa, synthetic construct
  source 1..19: note = Seed: VEAEVQIDRLITGRLQSLQ
VEAEVQIDRMITIRFQSMQ

SEQ ID NO: 101283 - protein, 19 aa, synthetic construct
  source 1..19: note = Seed: VEAEVQIDRLITGRLQSLQ
VEAEMQIERFITTRLQSLQ

SEQ ID NO: 101284 - protein, 19 aa, synthetic construct
  source 1..19: note = Seed: VEAEVQIDRLITGRLQSLQ
VEAEVQIDRWITLRFQSMQ

SEQ ID NO: 101285 - protein, 19 aa, synthetic construct
  source 1..19: note = Seed: VEAEVQIDRLITGRLQSLQ
VEAEVQIRRSITRRLQSLQ

SEQ ID NO: 101286 - protein, 19 aa, synthetic construct
  source 1..19: note = Seed: SELVIGAVILRGHLRIAGH
SELLIGDVFLREHLRIAGH

SEQ ID NO: 101287 - protein, 19 aa, synthetic construct
  source 1..19: note = Seed: VEAEVQIDRLITGRLQSLQ
VEAEFQIKRFITTRLQSLQ

SEQ ID NO: 101288 - protein, 19 aa, synthetic construct
  source 1..19: note = Seed: SELVIGAVILRGHLRIAGH
SELMIGDVFLRTHLRIAGH

SEQ ID NO: 101289 - protein, 19 aa, synthetic construct
  source 1..19: note = Seed: VEAEVQIDRLITGRLQSLQ
VEAEVQIPRFITFRLQSLQ

SEQ ID NO: 101290 - protein, 19 aa, synthetic construct
  source 1..19: note = Seed: VEAEVQIDRLITGRLQSLQ
VEAERQIERFITFRLQSLQ

SEQ ID NO: 101291 - protein, 19 aa, synthetic construct
  source 1..19: note = Seed: SELVIGAVILRGHLRIAGH
SELFIGDVMLRIHLRIAGH

SEQ ID NO: 101292 - protein, 19 aa, synthetic construct
  source 1..19: note = Seed: SELVIGAVILRGHLRIAGH
SELRIGVVFLRVHLRIAGH

SEQ ID NO: 101293 - protein, 19 aa, synthetic construct
  source 1..19: note = Seed: VKDCVVLHSYFTSDYYQLY
VKDCVVLHSFFTSDFYQVY

SEQ ID NO: 101294 - protein, 19 aa, synthetic construct
  source 1..19: note = Seed: VEAEVQIDRLITGRLQSLQ
VEAEVQIDRFITERIQSVQ

SEQ ID NO: 101295 - protein, 19 aa, synthetic construct
  source 1..19: note = Seed: SELVIGAVILRGHLRIAGH
SELYIGEVYLRTHLRIAGH

SEQ ID NO: 101296 - protein, 19 aa, synthetic construct
  source 1..19: note = Seed: VEAEVQIDRLITGRLQSLQ
VEAEIQIKRFITSRLQSLQ

SEQ ID NO: 101297 - protein, 19 aa, synthetic construct
  source 1..19: note = Seed: VEAEVQIDRLITGRLQSLQ
VEAEVQIDRLITLRYQSIQ

SEQ ID NO: 101298 - protein, 19 aa, synthetic construct
  source 1..19: note = Seed: VEAEVQIDRLITGRLQSLQ
VEAEVQIDRIITLRFQSFQ

SEQ ID NO: 101299 - protein, 19 aa, synthetic construct
  source 1..19: note = Seed: VEAEVQIDRLITGRLQSLQ
VEAELQITRFITHRLQSLQ

SEQ ID NO: 101300 - protein, 19 aa, synthetic construct
  source 1..19: note = Seed: VEAEVQIDRLITGRLQSLQ
VEAEFQIKRFITSRLQSLQ

SEQ ID NO: 101301 - protein, 19 aa, synthetic construct
  source 1..19: note = Seed: VEAEVQIDRLITGRLQSLQ
VEAEFQIVRFITERLQSLQ

SEQ ID NO: 101302 - protein, 19 aa, synthetic construct
  source 1..19: note = Seed: VEAEVQIDRLITGRLQSLQ
VEAEVQIDRFITQRFQSWQ

SEQ ID NO: 101303 - protein, 19 aa, synthetic construct
  source 1..19: note = Seed: VEAEVQIDRLITGRLQSLQ
VEAEWQISRFITERLQSLQ

SEQ ID NO: 101304 - protein, 19 aa, synthetic construct
  source 1..19: note = Seed: VEAEVQIDRLITGRLQSLQ
VEAEVQIDRFITMRYQSTQ

SEQ ID NO: 101305 - protein, 19 aa, synthetic construct
  source 1..19: note = Seed: SELVIGAVILRGHLRIAGH
SELRIGFVALRVHLRIAGH

SEQ ID NO: 101306 - protein, 19 aa, synthetic construct
  source 1..19: note = Seed: VEAEVQIDRLITGRLQSLQ
VEAEVQIDRFITNRIQSVQ

SEQ ID NO: 101307 - protein, 19 aa, synthetic construct
  source 1..19: note = Seed: VEAEVQIDRLITGRLQSLQ
VEAEFQIHRFITHRLQSLQ

SEQ ID NO: 101308 - protein, 19 aa, synthetic construct
  source 1..19: note = Seed: SELVIGAVILRGHLRIAGH
SELRIGTVFLRTHLRIAGH

SEQ ID NO: 101309 - protein, 19 aa, synthetic construct
  source 1..19: note = Seed: VEAEVQIDRLITGRLQSLQ
VEAEVQIDRFITERFQSEQ

SEQ ID NO: 101310 - protein, 19 aa, synthetic construct
  source 1..19: note = Seed: VEAEVQIDRLITGRLQSLQ
VEAEFQIKRFITHRLQSLQ

SEQ ID NO: 101311 - protein, 19 aa, synthetic construct
  source 1..19: note = Seed: SELVIGAVILRGHLRIAGH
SELRIGNVFLRIHLRIAGH

SEQ ID NO: 101312 - protein, 19 aa, synthetic construct
  source 1..19: note = Seed: SFRLFARTRSMWSFNPETN
SFRLFARTFSMFSLNPITN

SEQ ID NO: 101313 - protein, 19 aa, synthetic construct
  source 1..19: note = Seed: SELVIGAVILRGHLRIAGH
SELVIGAVIIRGMLKIAHH

SEQ ID NO: 101314 - protein, 19 aa, synthetic construct
  source 1..19: note = Seed: VKDCVVLHSYFTSDYYQLY
VKDCFVLHSFFTHDYYQLY

SEQ ID NO: 101315 - protein, 19 aa, synthetic construct
  source 1..19: note = Seed: VEAEVQIDRLITGRLQSLQ
VEAEVQIDRFITMRFQSQQ

SEQ ID NO: 101316 - protein, 19 aa, synthetic construct
  source 1..19: note = Seed: SFRLFARTRSMWSFNPETN
SFRLFARTFSMTSFNPYTN

SEQ ID NO: 101317 - protein, 19 aa, synthetic construct
  source 1..19: note = Seed: VEAEVQIDRLITGRLQSLQ
VEAEVQIDRFITYRFQSRQ

SEQ ID NO: 101318 - protein, 19 aa, synthetic construct
  source 1..19: note = Seed: VEAEVQIDRLITGRLQSLQ
VEAEVQIDRIITARFQSYQ

SEQ ID NO: 101319 - protein, 19 aa, synthetic construct
  source 1..19: note = Seed: SFRLFARTRSMWSFNPETN
SFRLFARTFSMTSLNPLTN

SEQ ID NO: 101320 - protein, 19 aa, synthetic construct
  source 1..19: note = Seed: SFRLFARTRSMWSFNPETN
SFRLFARTFSMFSYNPFTN

SEQ ID NO: 101321 - protein, 19 aa, synthetic construct
  source 1..19: note = Seed: SELVIGAVILRGHLRIAGH
SELRIGSVLLRLHLRIAGH

SEQ ID NO: 101322 - protein, 19 aa, synthetic construct
  source 1..19: note = Seed: VEAEVQIDRLITGRLQSLQ
VEAEFQIPRFITFRLQSLQ

SEQ ID NO: 101323 - protein, 19 aa, synthetic construct
  source 1..19: note = Seed: VEAEVQIDRLITGRLQSLQ
VEAEVQIDRFITHRMQSFQ

SEQ ID NO: 101324 - protein, 19 aa, synthetic construct
  source 1..19: note = Seed: VEAEVQIDRLITGRLQSLQ
VEAEYQISRFITHRLQSLQ

SEQ ID NO: 101325 - protein, 19 aa, synthetic construct
  source 1..19: note = Seed: VEAEVQIDRLITGRLQSLQ
VEAEVQIDRFITQRLQSFQ

SEQ ID NO: 101326 - protein, 19 aa, synthetic construct
  source 1..19: note = Seed: SELVIGAVILRGHLRIAGH
SELMIGEVILRVHLRIAGH

SEQ ID NO: 101327 - protein, 19 aa, synthetic construct
  source 1..19: note = Seed: VEAEVQIDRLITGRLQSLQ
VEAEVQIDRIITLRYQSVQ

SEQ ID NO: 101328 - protein, 19 aa, synthetic construct
  source 1..19: note = Seed: VEAEVQIDRLITGRLQSLQ
VEAEVQIDRLITLRFQSAQ

SEQ ID NO: 101329 - protein, 19 aa, synthetic construct
  source 1..19: note = Seed: VEAEVQIDRLITGRLQSLQ
VEAEVQIDRYITLRYQSLQ

SEQ ID NO: 101330 - protein, 19 aa, synthetic construct
  source 1..19: note = Seed: VEAEVQIDRLITGRLQSLQ
VEAEVQIDRFITERFQSDQ

SEQ ID NO: 101331 - protein, 19 aa, synthetic construct
  source 1..19: note = Seed: VEAEVQIDRLITGRLQSLQ
VEAEVQIDRVITQRFQSLQ

SEQ ID NO: 101332 - protein, 19 aa, synthetic construct
  source 1..19: note = Seed: VEAEVQIDRLITGRLQSLQ
VEAEVQIDRLITKRFQSLQ

SEQ ID NO: 101333 - protein, 19 aa, synthetic construct
  source 1..19: note = Seed: VEAEVQIDRLITGRLQSLQ
VEAELQIHRFITSRLQSLQ

SEQ ID NO: 101334 - protein, 19 aa, synthetic construct
  source 1..19: note = Seed: VEAEVQIDRLITGRLQSLQ
VEAEFQIHRFITQRLQSLQ

SEQ ID NO: 101335 - protein, 19 aa, synthetic construct
  source 1..19: note = Seed: VEAEVQIDRLITGRLQSLQ
VEAEVQIDRLITIRFQSEQ

SEQ ID NO: 101336 - protein, 19 aa, synthetic construct
  source 1..19: note = Seed: VEAEVQIDRLITGRLQSLQ
VEAEVQIDRFITERFQSWQ

SEQ ID NO: 101337 - protein, 19 aa, synthetic construct
  source 1..19: note = Seed: VEAEVQIDRLITGRLQSLQ
VEAEVQIDRWITERFQSFQ

SEQ ID NO: 101338 - protein, 19 aa, synthetic construct
  source 1..19: note = Seed: SELVIGAVILRGHLRIAGH
SELFIGKVFLRHHLRIAGH

SEQ ID NO: 101339 - protein, 19 aa, synthetic construct
  source 1..19: note = Seed: SFRLFARTRSMWSFNPETN
SFRLFARTFSMISLNPITN

SEQ ID NO: 101340 - protein, 19 aa, synthetic construct
  source 1..19: note = Seed: VEAEVQIDRLITGRLQSLQ
VEAEVQIDRFITFRLQSAQ

SEQ ID NO: 101341 - protein, 19 aa, synthetic construct
  source 1..19: note = Seed: VEAEVQIDRLITGRLQSLQ
VEAEFQIRRFITFRLQSLQ

SEQ ID NO: 101342 - protein, 19 aa, synthetic construct
  source 1..19: note = Seed: SFRLFARTRSMWSFNPETN
SFRLFARTYSMLSFNPLTN

SEQ ID NO: 101343 - protein, 19 aa, synthetic construct
  source 1..19: note = Seed: SFRLFARTRSMWSFNPETN
SFRLFARTRSIWSFNLETF

SEQ ID NO: 101344 - protein, 19 aa, synthetic construct
  source 1..19: note = Seed: SELVIGAVILRGHLRIAGH
SELRIGTVFLRDHLRIAGH

SEQ ID NO: 101345 - protein, 19 aa, synthetic construct
  source 1..19: note = Seed: SELVIGAVILRGHLRIAGH
SELRIGEVFLRMHLRIAGH

SEQ ID NO: 101346 - protein, 19 aa, synthetic construct
  source 1..19: note = Seed: SELVIGAVILRGHLRIAGH
SELRIGSVFLRNHLRIAGH

SEQ ID NO: 101347 - protein, 19 aa, synthetic construct
  source 1..19: note = Seed: SELVIGAVILRGHLRIAGH
SELRIGIVFLRVHLRIAGH

SEQ ID NO: 101348 - protein, 19 aa, synthetic construct
  source 1..19: note = Seed: VEAEVQIDRLITGRLQSLQ
VEAEFQIQRFITQRLQSLQ

SEQ ID NO: 101349 - protein, 19 aa, synthetic construct
  source 1..19: note = Seed: VEAEVQIDRLITGRLQSLQ
VEAEVQIDRFITERWQSFQ

SEQ ID NO: 101350 - protein, 19 aa, synthetic construct
  source 1..19: note = Seed: SELVIGAVILRGHLRIAGH
SELRIGMVFLRVHLRIAGH

SEQ ID NO: 101351 - protein, 19 aa, synthetic construct
  source 1..19: note = Seed: VEAEVQIDRLITGRLQSLQ
VEAEIQISRFITERLQSLQ

SEQ ID NO: 101352 - protein, 19 aa, synthetic construct
  source 1..19: note = Seed: SELVIGAVILRGHLRIAGH
SELKIGTVFLRFHLRIAGH

SEQ ID NO: 101353 - protein, 19 aa, synthetic construct
  source 1..19: note = Seed: SFRLFARTRSMWSFNPETN
SFRLFARTFSMASFNPYTN

SEQ ID NO: 101354 - protein, 19 aa, synthetic construct
  source 1..19: note = Seed: VEAEVQIDRLITGRLQSLQ
VEAELQISRFITERLQSLQ

SEQ ID NO: 101355 - protein, 19 aa, synthetic construct
  source 1..19: note = Seed: VEAEVQIDRLITGRLQSLQ
VEAEVQIDRFITYRFQSDQ

SEQ ID NO: 101356 - protein, 19 aa, synthetic construct
  source 1..19: note = Seed: VEAEVQIDRLITGRLQSLQ
VEAEWQITRFITERLQSLQ

SEQ ID NO: 101357 - protein, 19 aa, synthetic construct
  source 1..19: note = Seed: VEAEVQIDRLITGRLQSLQ
VEAEYQINRFITTRLQSLQ

SEQ ID NO: 101358 - protein, 19 aa, synthetic construct
  source 1..19: note = Seed: VEAEVQIDRLITGRLQSLQ
VEAEYQIKRFITNRLQSLQ

SEQ ID NO: 101359 - protein, 19 aa, synthetic construct
  source 1..19: note = Seed: VKDCVVLHSYFTSDYYQLY
VKDCVVLHSFFTSDFYQIY

SEQ ID NO: 101360 - protein, 19 aa, synthetic construct
  source 1..19: note = Seed: SELVIGAVILRGHLRIAGH
SELTIGSVFLRYHLRIAGH

SEQ ID NO: 101361 - protein, 19 aa, synthetic construct
  source 1..19: note = Seed: SELVIGAVILRGHLRIAGH
SELMIGEVILRIHLRIAGH

SEQ ID NO: 101362 - protein, 19 aa, synthetic construct
  source 1..19: note = Seed: SFRLFARTRSMWSFNPETN
SFRLFARTFSMVSWNPLTN

SEQ ID NO: 101363 - protein, 19 aa, synthetic construct
  source 1..19: note = Seed: SELVIGAVILRGHLRIAGH
SELPIGGVVLRAHLRIAGH

SEQ ID NO: 101364 - protein, 19 aa, synthetic construct
  source 1..19: note = Seed: VEAEVQIDRLITGRLQSLQ
VEAEVQIDRFITSRFQSKQ

SEQ ID NO: 101365 - protein, 19 aa, synthetic construct
  source 1..19: note = Seed: SELVIGAVILRGHLRIAGH
SELRIGSVYLRLHLRIAGH

SEQ ID NO: 101366 - protein, 19 aa, synthetic construct
  source 1..19: note = Seed: VEAEVQIDRLITGRLQSLQ
VEAEVQIDRIITFRFQSNQ

SEQ ID NO: 101367 - protein, 19 aa, synthetic construct
  source 1..19: note = Seed: SFRLFARTRSMWSFNPETN
SFRLFARTFSMISYNPFTN

SEQ ID NO: 101368 - protein, 19 aa, synthetic construct
  source 1..19: note = Seed: SFRLFARTRSMWSFNPETN
SFRLFARTFSMTSYNPITN

SEQ ID NO: 101369 - protein, 19 aa, synthetic construct
  source 1..19: note = Seed: VKDCVVLHSYFTSDYYQLY
VKDCFVLHSFFTVDYYQLY

SEQ ID NO: 101370 - protein, 19 aa, synthetic construct
  source 1..19: note = Seed: VEAEVQIDRLITGRLQSLQ
VEAEFQIQRYITIRLQSLQ

SEQ ID NO: 101371 - protein, 19 aa, synthetic construct
  source 1..19: note = Seed: VEAEVQIDRLITGRLQSLQ
VEAEVQIDRFITYRFQSEQ

SEQ ID NO: 101372 - protein, 19 aa, synthetic construct
  source 1..19: note = Seed: SFRLFARTRSMWSFNPETN
SFRLFARTYSMFSFNPFTN

SEQ ID NO: 101373 - protein, 19 aa, synthetic construct
  source 1..19: note = Seed: VKDCVVLHSYFTSDYYQLY
VKDCVVLHSFFTHDFYQVY

SEQ ID NO: 101374 - protein, 19 aa, synthetic construct
  source 1..19: note = Seed: VEAEVQIDRLITGRLQSLQ
VEAEVQIDRYITIRFQSDQ

SEQ ID NO: 101375 - protein, 19 aa, synthetic construct
  source 1..19: note = Seed: VEAEVQIDRLITGRLQSLQ
VEAEIQIARFITHRLQSLQ

SEQ ID NO: 101376 - protein, 19 aa, synthetic construct
  source 1..19: note = Seed: SFRLFARTRSMWSFNPETN
SFRLFARTYSMSSFNPLTN

SEQ ID NO: 101377 - protein, 19 aa, synthetic construct
  source 1..19: note = Seed: SELVIGAVILRGHLRIAGH
SELFIGDVWLRAHLRIAGH

SEQ ID NO: 101378 - protein, 19 aa, synthetic construct
  source 1..19: note = Seed: SELVIGAVILRGHLRIAGH
SELFIGHVMLRAHLRIAGH

SEQ ID NO: 101379 - protein, 19 aa, synthetic construct
  source 1..19: note = Seed: SELVIGAVILRGHLRIAGH
SELLIGQVFLRHHLRIAGH

SEQ ID NO: 101380 - protein, 19 aa, synthetic construct
  source 1..19: note = Seed: VEAEVQIDRLITGRLQSLQ
VEAEVQIDRIITYRFQSLQ

SEQ ID NO: 101381 - protein, 19 aa, synthetic construct
  source 1..19: note = Seed: SFRLFARTRSMWSFNPETN
SFRLFARTFSMFSLNPLTN

SEQ ID NO: 101382 - protein, 19 aa, synthetic construct
  source 1..19: note = Seed: SELVIGAVILRGHLRIAGH
SELYIGTVWLRAHLRIAGH

SEQ ID NO: 101383 - protein, 19 aa, synthetic construct
  source 1..19: note = Seed: VEAEVQIDRLITGRLQSLQ
VEAEYQIHRFITTRLQSLQ

SEQ ID NO: 101384 - protein, 19 aa, synthetic construct
  source 1..19: note = Seed: SELVIGAVILRGHLRIAGH
SELRIGEVFLREHLRIAGH

SEQ ID NO: 101385 - protein, 19 aa, synthetic construct
  source 1..19: note = Seed: VEAEVQIDRLITGRLQSLQ
VEAEWQINRFITIRLQSLQ

SEQ ID NO: 101386 - protein, 19 aa, synthetic construct
  source 1..19: note = Seed: VEAEVQIDRLITGRLQSLQ
VEAEFQICRFITERLQSLQ

SEQ ID NO: 101387 - protein, 19 aa, synthetic construct
  source 1..19: note = Seed: SELVIGAVILRGHLRIAGH
SELLIGDVFLRDHLRIAGH

SEQ ID NO: 101388 - protein, 19 aa, synthetic construct
  source 1..19: note = Seed: VEAEVQIDRLITGRLQSLQ
VEAEVQIDRYITIRYQSFQ

SEQ ID NO: 101389 - protein, 19 aa, synthetic construct
  source 1..19: note = Seed: VEAEVQIDRLITGRLQSLQ
VEAELQIARFITTRLQSLQ

SEQ ID NO: 101390 - protein, 19 aa, synthetic construct
  source 1..19: note = Seed: VEAEVQIDRLITGRLQSLQ
VEAEVQIDRIITMRFQSTQ

SEQ ID NO: 101391 - protein, 19 aa, synthetic construct
  source 1..19: note = Seed: VEAEVQIDRLITGRLQSLQ
VEAEIQIIRFITVRLQSLQ

SEQ ID NO: 101392 - protein, 19 aa, synthetic construct
  source 1..19: note = Seed: SELVIGAVILRGHLRIAGH
SELMIGDVFLRFHLRIAGH

SEQ ID NO: 101393 - protein, 19 aa, synthetic construct
  source 1..19: note = Seed: SFRLFARTRSMWSFNPETN
SFRLFARTFSMLSFNPYTN

SEQ ID NO: 101394 - protein, 19 aa, synthetic construct
  source 1..19: note = Seed: VEAEVQIDRLITGRLQSLQ
VEAELQIIRFITHRLQSLQ

SEQ ID NO: 101395 - protein, 19 aa, synthetic construct
  source 1..19: note = Seed: VEAEVQIDRLITGRLQSLQ
VEAEVQIDRFITERFQSQQ

SEQ ID NO: 101396 - protein, 19 aa, synthetic construct
  source 1..19: note = Seed: SFRLFARTRSMWSFNPETN
SFRLFARTFSMLSMNPVTN

SEQ ID NO: 101397 - protein, 19 aa, synthetic construct
  source 1..19: note = Seed: SFRLFARTRSMWSFNPETN
SFRLFARTFSMYSFNPFTN

SEQ ID NO: 101398 - protein, 19 aa, synthetic construct
  source 1..19: note = Seed: SFRLFARTRSMWSFNPETN
SFRLFARTLSMASFNPLTN

SEQ ID NO: 101399 - protein, 19 aa, synthetic construct
  source 1..19: note = Seed: VEAEVQIDRLITGRLQSLQ
VEAEVQIDRFITQRMQSIQ

SEQ ID NO: 101400 - protein, 19 aa, synthetic construct
  source 1..19: note = Seed: VEAEVQIDRLITGRLQSLQ
VEAEFQIRRFITLRLQSLQ

SEQ ID NO: 101401 - protein, 19 aa, synthetic construct
  source 1..19: note = Seed: VEAEVQIDRLITGRLQSLQ
VEAEVQIDRFITHRVQSLQ

SEQ ID NO: 101402 - protein, 19 aa, synthetic construct
  source 1..19: note = Seed: VEAEVQIDRLITGRLQSLQ
VEAEFQIKRFITERLQSLQ

SEQ ID NO: 101403 - protein, 19 aa, synthetic construct
  source 1..19: note = Seed: SELVIGAVILRGHLRIAGH
SELWIGDVYLRVHLRIAGH

SEQ ID NO: 101404 - protein, 19 aa, synthetic construct
  source 1..19: note = Seed: VKDCVVLHSYFTSDYYQLY
VKDCVVLHSFFTHDFYQLY

SEQ ID NO: 101405 - protein, 19 aa, synthetic construct
  source 1..19: note = Seed: VEAEVQIDRLITGRLQSLQ
VEAEYQINRFITLRLQSLQ

SEQ ID NO: 101406 - protein, 19 aa, synthetic construct
  source 1..19: note = Seed: SFRLFARTRSMWSFNPETN
SFRLFARTLSMISFNPLTN

SEQ ID NO: 101407 - protein, 19 aa, synthetic construct
  source 1..19: note = Seed: VEAEVQIDRLITGRLQSLQ
VEAELQIHRFITNRLQSLQ

SEQ ID NO: 101408 - protein, 19 aa, synthetic construct
  source 1..19: note = Seed: SELVIGAVILRGHLRIAGH
SELFIGHVILRAHLRIAGH

SEQ ID NO: 101409 - protein, 19 aa, synthetic construct
  source 1..19: note = Seed: VEAEVQIDRLITGRLQSLQ
VEAEMQINRFITVRLQSLQ

SEQ ID NO: 101410 - protein, 19 aa, synthetic construct
  source 1..19: note = Seed: VEAEVQIDRLITGRLQSLQ
VEAELQIVRFITHRLQSLQ

SEQ ID NO: 101411 - protein, 19 aa, synthetic construct
  source 1..19: note = Seed: VEAEVQIDRLITGRLQSLQ
VEAEIQIVRFITHRLQSLQ

SEQ ID NO: 101412 - protein, 19 aa, synthetic construct
  source 1..19: note = Seed: SELVIGAVILRGHLRIAGH
SELRIGTVFLRNHLRIAGH

SEQ ID NO: 101413 - protein, 19 aa, synthetic construct
  source 1..19: note = Seed: VEAEVQIDRLITGRLQSLQ
VEAEYQIHRFITERLQSLQ

SEQ ID NO: 101414 - protein, 19 aa, synthetic construct
  source 1..19: note = Seed: VEAEVQIDRLITGRLQSLQ
VEAEFQITRFITRRLQSLQ

SEQ ID NO: 101415 - protein, 19 aa, synthetic construct
  source 1..19: note = Seed: SFRLFARTRSMWSFNPETN
SFRLFARTFSMQSFNPVTN

SEQ ID NO: 101416 - protein, 19 aa, synthetic construct
  source 1..19: note = Seed: VEAEVQIDRLITGRLQSLQ
VEAEVQIDRFITQRIQSIQ

SEQ ID NO: 101417 - protein, 19 aa, synthetic construct
  source 1..19: note = Seed: VEAEVQIDRLITGRLQSLQ
VEAEVQIDRFITTRFQSWQ

SEQ ID NO: 101418 - protein, 19 aa, synthetic construct
  source 1..19: note = Seed: VEAEVQIDRLITGRLQSLQ
VEAEFQIKRFITYRLQSLQ

SEQ ID NO: 101419 - protein, 19 aa, synthetic construct
  source 1..19: note = Seed: VEAEVQIDRLITGRLQSLQ
VEAEVQIDRCITTRFQSIQ

SEQ ID NO: 101420 - protein, 19 aa, synthetic construct
  source 1..19: note = Seed: VEAEVQIDRLITGRLQSLQ
VEAEFQIQRYITLRLQSLQ

SEQ ID NO: 101421 - protein, 19 aa, synthetic construct
  source 1..19: note = Seed: SELVIGAVILRGHLRIAGH
SELLIGYVMLRRHLRIAGH

SEQ ID NO: 101422 - protein, 19 aa, synthetic construct
  source 1..19: note = Seed: SFRLFARTRSMWSFNPETN
SFRLFARTYSMTSFNPITN

SEQ ID NO: 101423 - protein, 19 aa, synthetic construct
  source 1..19: note = Seed: VKDCVVLHSYFTSDYYQLY
VKDCVVLHSFFTTDFYQLY

SEQ ID NO: 101424 - protein, 19 aa, synthetic construct
  source 1..19: note = Seed: SELVIGAVILRGHLRIAGH
SELYIGEVYLRDHLRIAGH

SEQ ID NO: 101425 - protein, 19 aa, synthetic construct
  source 1..19: note = Seed: VEAEVQIDRLITGRLQSLQ
VEAEMQIARFITSRLQSLQ

SEQ ID NO: 101426 - protein, 19 aa, synthetic construct
  source 1..19: note = Seed: VEAEVQIDRLITGRLQSLQ
VEAEVQIDRYITDRFQSIQ

SEQ ID NO: 101427 - protein, 19 aa, synthetic construct
  source 1..19: note = Seed: SFRLFARTRSMWSFNPETN
SFRLFARTFSMDSFNPITN

SEQ ID NO: 101428 - protein, 19 aa, synthetic construct
  source 1..19: note = Seed: VEAEVQIDRLITGRLQSLQ
VEAEVQIDRYITLRFQSSQ

SEQ ID NO: 101429 - protein, 19 aa, synthetic construct
  source 1..19: note = Seed: VEAEVQIDRLITGRLQSLQ
VEAEVQIDRLITQRFQSMQ

SEQ ID NO: 101430 - protein, 19 aa, synthetic construct
  source 1..19: note = Seed: VEAEVQIDRLITGRLQSLQ
VEAEVQIDRFITFRLQSRQ

SEQ ID NO: 101431 - protein, 19 aa, synthetic construct
  source 1..19: note = Seed: SELVIGAVILRGHLRIAGH
SELVIGEVFLRPHLRIAGH

SEQ ID NO: 101432 - protein, 19 aa, synthetic construct
  source 1..19: note = Seed: VEAEVQIDRLITGRLQSLQ
VEAEVQIDRLITVRWQSLQ

SEQ ID NO: 101433 - protein, 19 aa, synthetic construct
  source 1..19: note = Seed: VEAEVQIDRLITGRLQSLQ
VEAEMQIHRFITFRLQSLQ

SEQ ID NO: 101434 - protein, 19 aa, synthetic construct
  source 1..19: note = Seed: SELVIGAVILRGHLRIAGH
SELRIGSVWLRLHLRIAGH

SEQ ID NO: 101435 - protein, 19 aa, synthetic construct
  source 1..19: note = Seed: VEAEVQIDRLITGRLQSLQ
VEAEFQIFRFITDRLQSLQ

SEQ ID NO: 101436 - protein, 19 aa, synthetic construct
  source 1..19: note = Seed: SELVIGAVILRGHLRIAGH
SELRIGEVLLRIHLRIAGH

SEQ ID NO: 101437 - protein, 19 aa, synthetic construct
  source 1..19: note = Seed: SELVIGAVILRGHLRIAGH
SELRIGSVWLRVHLRIAGH

SEQ ID NO: 101438 - protein, 19 aa, synthetic construct
  source 1..19: note = Seed: SFRLFARTRSMWSFNPETN
SFRLFARTFSMVSFNPSTN

SEQ ID NO: 101439 - protein, 19 aa, synthetic construct
  source 1..19: note = Seed: VEAEVQIDRLITGRLQSLQ
VEAEVQIDRFITFRFQSCQ

SEQ ID NO: 101440 - protein, 19 aa, synthetic construct
  source 1..19: note = Seed: VEAEVQIDRLITGRLQSLQ
VEAEVQIDRFITTRLQSSQ

SEQ ID NO: 101441 - protein, 19 aa, synthetic construct
  source 1..19: note = Seed: VEAEVQIDRLITGRLQSLQ
VEAEVQIDRFITERFQSPQ

SEQ ID NO: 101442 - protein, 19 aa, synthetic construct
  source 1..19: note = Seed: VEAEVQIDRLITGRLQSLQ
VEAEVQIDRIITLRLQSFQ

SEQ ID NO: 101443 - protein, 19 aa, synthetic construct
  source 1..19: note = Seed: VEAEVQIDRLITGRLQSLQ
VEAEHQITRFITFRLQSLQ

SEQ ID NO: 101444 - protein, 19 aa, synthetic construct
  source 1..19: note = Seed: SELVIGAVILRGHLRIAGH
SELMIGEVMLRVHLRIAGH

SEQ ID NO: 101445 - protein, 19 aa, synthetic construct
  source 1..19: note = Seed: VEAEVQIDRLITGRLQSLQ
VEAEVQIDRFITHRIQSMQ

SEQ ID NO: 101446 - protein, 19 aa, synthetic construct
  source 1..19: note = Seed: VKDCVVLHSYFTSDYYQLY
VKDCFVLHSFFTLDYYQLY

SEQ ID NO: 101447 - protein, 19 aa, synthetic construct
  source 1..19: note = Seed: VEAEVQIDRLITGRLQSLQ
VEAEVQIDRFITDRFQSTQ

SEQ ID NO: 101448 - protein, 19 aa, synthetic construct
  source 1..19: note = Seed: SELVIGAVILRGHLRIAGH
SELFIGDVWLRNHLRIAGH

SEQ ID NO: 101449 - protein, 19 aa, synthetic construct
  source 1..19: note = Seed: SELVIGAVILRGHLRIAGH
SELRIGEVLLRVHLRIAGH

SEQ ID NO: 101450 - protein, 19 aa, synthetic construct
  source 1..19: note = Seed: VEAEVQIDRLITGRLQSLQ
VEAEVQIDRLITNRFQSFQ

SEQ ID NO: 101451 - protein, 19 aa, synthetic construct
  source 1..19: note = Seed: VEAEVQIDRLITGRLQSLQ
VEAEVQIDRLITYRFQSFQ

SEQ ID NO: 101452 - protein, 19 aa, synthetic construct
  source 1..19: note = Seed: VEAEVQIDRLITGRLQSLQ
VEAEVQIFRNITARLQSLQ

SEQ ID NO: 101453 - protein, 19 aa, synthetic construct
  source 1..19: note = Seed: SELVIGAVILRGHLRIAGH
SELFIGEVMLRTHLRIAGH

SEQ ID NO: 101454 - protein, 19 aa, synthetic construct
  source 1..19: note = Seed: VEAEVQIDRLITGRLQSLQ
VEAEVQIDRIITDRFQSIQ

SEQ ID NO: 101455 - protein, 19 aa, synthetic construct
  source 1..19: note = Seed: VEAEVQIDRLITGRLQSLQ
VEAEYQIRRFITLRLQSLQ

SEQ ID NO: 101456 - protein, 19 aa, synthetic construct
  source 1..19: note = Seed: VEAEVQIDRLITGRLQSLQ
VEAEFQIMRFITDRLQSLQ

SEQ ID NO: 101457 - protein, 19 aa, synthetic construct
  source 1..19: note = Seed: VEAEVQIDRLITGRLQSLQ
VEAEYQISRYITIRLQSLQ

SEQ ID NO: 101458 - protein, 19 aa, synthetic construct
  source 1..19: note = Seed: SELVIGAVILRGHLRIAGH
SELRIGSVLLRFHLRIAGH

SEQ ID NO: 101459 - protein, 19 aa, synthetic construct
  source 1..19: note = Seed: SFRLFARTRSMWSFNPETN
SFRLFARTFSMDSFNPVTN

SEQ ID NO: 101460 - protein, 19 aa, synthetic construct
  source 1..19: note = Seed: VEAEVQIDRLITGRLQSLQ
VEAEVQIDRLITMRFQSAQ

SEQ ID NO: 101461 - protein, 19 aa, synthetic construct
  source 1..19: note = Seed: SELVIGAVILRGHLRIAGH
SELRIGEVLLRLHLRIAGH

SEQ ID NO: 101462 - protein, 19 aa, synthetic construct
  source 1..19: note = Seed: VEAEVQIDRLITGRLQSLQ
VEAELQIKRFITLRLQSLQ

SEQ ID NO: 101463 - protein, 19 aa, synthetic construct
  source 1..19: note = Seed: SFRLFARTRSMWSFNPETN
SFRLFARTLSMESFNPITN

SEQ ID NO: 101464 - protein, 19 aa, synthetic construct
  source 1..19: note = Seed: SELVIGAVILRGHLRIAGH
SELFIGMVYLRNHLRIAGH

SEQ ID NO: 101465 - protein, 19 aa, synthetic construct
  source 1..19: note = Seed: VEAEVQIDRLITGRLQSLQ
VEAELQIRRFITSRLQSLQ

SEQ ID NO: 101466 - protein, 19 aa, synthetic construct
  source 1..19: note = Seed: VEAEVQIDRLITGRLQSLQ
VEAEFQIHRWITIRLQSLQ

SEQ ID NO: 101467 - protein, 19 aa, synthetic construct
  source 1..19: note = Seed: SELVIGAVILRGHLRIAGH
SELFIGDVFLRGHLRIAGH

SEQ ID NO: 101468 - protein, 19 aa, synthetic construct
  source 1..19: note = Seed: VEAEVQIDRLITGRLQSLQ
VEAEVQIDRFITWRYQSFQ

SEQ ID NO: 101469 - protein, 19 aa, synthetic construct
  source 1..19: note = Seed: SELVIGAVILRGHLRIAGH
SELFIGDVYLREHLRIAGH

SEQ ID NO: 101470 - protein, 19 aa, synthetic construct
  source 1..19: note = Seed: SFRLFARTRSMWSFNPETN
SFRLFARTFSMYSFNPLTN

SEQ ID NO: 101471 - protein, 19 aa, synthetic construct
  source 1..19: note = Seed: SFRLFARTRSMWSFNPETN
SFRLFARTFSMISINPITN

SEQ ID NO: 101472 - protein, 19 aa, synthetic construct
  source 1..19: note = Seed: VEAEVQIDRLITGRLQSLQ
VEAEWQINRFITSRLQSLQ

SEQ ID NO: 101473 - protein, 19 aa, synthetic construct
  source 1..19: note = Seed: VEAEVQIDRLITGRLQSLQ
VEAEIQITRFITYRLQSLQ

SEQ ID NO: 101474 - protein, 19 aa, synthetic construct
  source 1..19: note = Seed: VKDCVVLHSYFTSDYYQLY
VKDCVVLHSFFTADFYQVY

SEQ ID NO: 101475 - protein, 19 aa, synthetic construct
  source 1..19: note = Seed: VEAEVQIDRLITGRLQSLQ
VEAEVQIDRFITSRLQSTQ

SEQ ID NO: 101476 - protein, 19 aa, synthetic construct
  source 1..19: note = Seed: VEAEVQIDRLITGRLQSLQ
VEAEVQIDRYITYRFQSFQ

SEQ ID NO: 101477 - protein, 19 aa, synthetic construct
  source 1..19: note = Seed: SELVIGAVILRGHLRIAGH
SELRIGSVMLRLHLRIAGH

SEQ ID NO: 101478 - protein, 19 aa, synthetic construct
  source 1..19: note = Seed: SFRLFARTRSMWSFNPETN
SFRLFARTFSMFSMNPVTN

SEQ ID NO: 101479 - protein, 19 aa, synthetic construct
  source 1..19: note = Seed: SELVIGAVILRGHLRIAGH
SELMIGNVFLRSHLRIAGH

SEQ ID NO: 101480 - protein, 19 aa, synthetic construct
  source 1..19: note = Seed: VEAEVQIDRLITGRLQSLQ
VEAEVQIDRFITHRVQSIQ

SEQ ID NO: 101481 - protein, 19 aa, synthetic construct
  source 1..19: note = Seed: VEAEVQIDRLITGRLQSLQ
VEAEYQIHRFITHRLQSLQ

SEQ ID NO: 101482 - protein, 19 aa, synthetic construct
  source 1..19: note = Seed: VKDCVVLHSYFTSDYYQLY
VKDCFVLSSYFTYDYYQLY

SEQ ID NO: 101483 - protein, 19 aa, synthetic construct
  source 1..19: note = Seed: VEAEVQIDRLITGRLQSLQ
VEAEVQIDRWITTRWQSLQ

SEQ ID NO: 101484 - protein, 19 aa, synthetic construct
  source 1..19: note = Seed: VEAEVQIDRLITGRLQSLQ
VEAEVQIDRYITERFQSTQ

SEQ ID NO: 101485 - protein, 19 aa, synthetic construct
  source 1..19: note = Seed: VEAEVQIDRLITGRLQSLQ
VEAEVQIDRFITARYQSNQ

SEQ ID NO: 101486 - protein, 19 aa, synthetic construct
  source 1..19: note = Seed: SELVIGAVILRGHLRIAGH
SELLIGFVMLRRHLRIAGH

SEQ ID NO: 101487 - protein, 19 aa, synthetic construct
  source 1..19: note = Seed: SELVIGAVILRGHLRIAGH
SELKIGTVLLRVHLRIAGH

SEQ ID NO: 101488 - protein, 19 aa, synthetic construct
  source 1..19: note = Seed: VEAEVQIDRLITGRLQSLQ
VEAEFQIKRYITLRLQSLQ

SEQ ID NO: 101489 - protein, 19 aa, synthetic construct
  source 1..19: note = Seed: VEAEVQIDRLITGRLQSLQ
VEAEVQIDRFITSRLQSDQ

SEQ ID NO: 101490 - protein, 19 aa, synthetic construct
  source 1..19: note = Seed: VEAEVQIDRLITGRLQSLQ
VEAEVQIDRFITERFQSCQ

SEQ ID NO: 101491 - protein, 19 aa, synthetic construct
  source 1..19: note = Seed: VKDCVVLHSYFTSDYYQLY
VKDCVVLHSFFTLDYYQLY

SEQ ID NO: 101492 - protein, 19 aa, synthetic construct
  source 1..19: note = Seed: VEAEVQIDRLITGRLQSLQ
VEAEFQINRFITYRLQSLQ

SEQ ID NO: 101493 - protein, 19 aa, synthetic construct
  source 1..19: note = Seed: SELVIGAVILRGHLRIAGH
SELVIGDVFLRSHLRIAGH

SEQ ID NO: 101494 - protein, 19 aa, synthetic construct
  source 1..19: note = Seed: SELVIGAVILRGHLRIAGH
SELFIGEVILRAHLRIAGH

SEQ ID NO: 101495 - protein, 19 aa, synthetic construct
  source 1..19: note = Seed: SFRLFARTRSMWSFNPETN
SFRLFARTFSMFSFNPRTN

SEQ ID NO: 101496 - protein, 19 aa, synthetic construct
  source 1..19: note = Seed: SELVIGAVILRGHLRIAGH
SELLIGQVMLRVHLRIAGH

SEQ ID NO: 101497 - protein, 19 aa, synthetic construct
  source 1..19: note = Seed: SELVIGAVILRGHLRIAGH
SELRIGTVLLRYHLRIAGH

SEQ ID NO: 101498 - protein, 19 aa, synthetic construct
  source 1..19: note = Seed: VEAEVQIDRLITGRLQSLQ
VEAEVQIDRIITERFQSSQ

SEQ ID NO: 101499 - protein, 19 aa, synthetic construct
  source 1..19: note = Seed: VEAEVQIDRLITGRLQSLQ
VEAEVQIDRLITLRIQSLQ

SEQ ID NO: 101500 - protein, 19 aa, synthetic construct
  source 1..19: note = Seed: SELVIGAVILRGHLRIAGH
SELRIGEVFLRAHLRIAGH

SEQ ID NO: 101501 - protein, 19 aa, synthetic construct
  source 1..19: note = Seed: GAGAALQIPFAMQMAYRFN
GAGAAFQIHFFMQIAYRFN

SEQ ID NO: 101502 - protein, 19 aa, synthetic construct
  source 1..19: note = Seed: VEAEVQIDRLITGRLQSLQ
VEAEVQIDRFITARWQSFQ

SEQ ID NO: 101503 - protein, 19 aa, synthetic construct
  source 1..19: note = Seed: SELVIGAVILRGHLRIAGH
SELMIGEVMLRFHLRIAGH

SEQ ID NO: 101504 - protein, 19 aa, synthetic construct
  source 1..19: note = Seed: VEAEVQIDRLITGRLQSLQ
VEAEVQIDRYITTRIQSFQ

SEQ ID NO: 101505 - protein, 19 aa, synthetic construct
  source 1..19: note = Seed: VEAEVQIDRLITGRLQSLQ
VEAEIQINRFITMRLQSLQ

SEQ ID NO: 101506 - protein, 19 aa, synthetic construct
  source 1..19: note = Seed: SELVIGAVILRGHLRIAGH
SELVIGFVIHRAHLLIAGH

SEQ ID NO: 101507 - protein, 19 aa, synthetic construct
  source 1..19: note = Seed: SFRLFARTRSMWSFNPETN
SFRLFARTRSIWSFNIETI

SEQ ID NO: 101508 - protein, 19 aa, synthetic construct
  source 1..19: note = Seed: SFRLFARTRSMWSFNPETN
SFRLFARHRFMWAFNPETN

SEQ ID NO: 101509 - protein, 19 aa, synthetic construct
  source 1..19: note = Seed: VEAEVQIDRLITGRLQSLQ
VEAELQINRFITMRLQSLQ

SEQ ID NO: 101510 - protein, 19 aa, synthetic construct
  source 1..19: note = Seed: VEAEVQIDRLITGRLQSLQ
VEAEVQIDRYITFRWQSLQ

SEQ ID NO: 101511 - protein, 19 aa, synthetic construct
  source 1..19: note = Seed: VEAEVQIDRLITGRLQSLQ
VEAEVQIDRFITTRIQSTQ

SEQ ID NO: 101512 - protein, 19 aa, synthetic construct
  source 1..19: note = Seed: SELVIGAVILRGHLRIAGH
SELLIGDVLLRVHLRIAGH

SEQ ID NO: 101513 - protein, 19 aa, synthetic construct
  source 1..19: note = Seed: VEAEVQIDRLITGRLQSLQ
VEAEYQIVRFITTRLQSLQ

SEQ ID NO: 101514 - protein, 19 aa, synthetic construct
  source 1..19: note = Seed: VEAEVQIDRLITGRLQSLQ
VEAEFQIHRWITLRLQSLQ

SEQ ID NO: 101515 - protein, 19 aa, synthetic construct
  source 1..19: note = Seed: VKDCVVLHSYFTSDYYQLY
VKDCVVLHSFFTADFYQLY

SEQ ID NO: 101516 - protein, 19 aa, synthetic construct
  source 1..19: note = Seed: VEAEVQIDRLITGRLQSLQ
VEAEVQIDRYITTRYQSFQ

SEQ ID NO: 101517 - protein, 19 aa, synthetic construct
  source 1..19: note = Seed: SELVIGAVILRGHLRIAGH
SELHIGEVLLRIHLRIAGH

SEQ ID NO: 101518 - protein, 19 aa, synthetic construct
  source 1..19: note = Seed: SELVIGAVILRGHLRIAGH
SELRIGTVLLRFHLRIAGH

SEQ ID NO: 101519 - protein, 19 aa, synthetic construct
  source 1..19: note = Seed: VEAEVQIDRLITGRLQSLQ
VEAEMQIQRFITMRLQSLQ

SEQ ID NO: 101520 - protein, 19 aa, synthetic construct
  source 1..19: note = Seed: GAGAALQIPFAMQMAYRFN
GAGAALQIPFAMSMFYRIN

SEQ ID NO: 101521 - protein, 19 aa, synthetic construct
  source 1..19: note = Seed: VEAEVQIDRLITGRLQSLQ
VEAEWQINRFITMRLQSLQ

SEQ ID NO: 101522 - protein, 19 aa, synthetic construct
  source 1..19: note = Seed: VEAEVQIDRLITGRLQSLQ
VEAEVQIDRYITTRFQSEQ

SEQ ID NO: 101523 - protein, 19 aa, synthetic construct
  source 1..19: note = Seed: VEAEVQIDRLITGRLQSLQ
VEAEVQIDRLITERFQSSQ

SEQ ID NO: 101524 - protein, 19 aa, synthetic construct
  source 1..19: note = Seed: VKDCVVLHSYFTSDYYQLY
VKDCVVLHSFFTADFYQIY

SEQ ID NO: 101525 - protein, 19 aa, synthetic construct
  source 1..19: note = Seed: VKDCVVLHSYFTSDYYQLY
VKDCVVLHSFFTSDFYQMY

SEQ ID NO: 101526 - protein, 19 aa, synthetic construct
  source 1..19: note = Seed: VKDCVVLHSYFTSDYYQLY
VKDCVVLHSFFTTDFYQMY

SEQ ID NO: 101527 - protein, 19 aa, synthetic construct
  source 1..19: note = Seed: VEAEVQIDRLITGRLQSLQ
VEAEWQIHRFITYRLQSLQ

SEQ ID NO: 101528 - protein, 19 aa, synthetic construct
  source 1..19: note = Seed: VEAEVQIDRLITGRLQSLQ
VEAEVQIDRLITFRWQSIQ

SEQ ID NO: 101529 - protein, 19 aa, synthetic construct
  source 1..19: note = Seed: SELVIGAVILRGHLRIAGH
SELVIGEVILRVHLRIAGH

SEQ ID NO: 101530 - protein, 19 aa, synthetic construct
  source 1..19: note = Seed: SELVIGAVILRGHLRIAGH
SELFIGNVLLRAHLRIAGH

SEQ ID NO: 101531 - protein, 19 aa, synthetic construct
  source 1..19: note = Seed: SELVIGAVILRGHLRIAGH
SELYIGQVILRVHLRIAGH

SEQ ID NO: 101532 - protein, 19 aa, synthetic construct
  source 1..19: note = Seed: VEAEVQIDRLITGRLQSLQ
VEAEIQIGRFITVRLQSLQ

SEQ ID NO: 101533 - protein, 19 aa, synthetic construct
  source 1..19: note = Seed: SFRLFARTRSMWSFNPETN
SFRLFARTFSMFSINPFTN

SEQ ID NO: 101534 - protein, 19 aa, synthetic construct
  source 1..19: note = Seed: VEAEVQIDRLITGRLQSLQ
VEAEVQIDRWITIRMQSLQ

SEQ ID NO: 101535 - protein, 19 aa, synthetic construct
  source 1..19: note = Seed: VEAEVQIDRLITGRLQSLQ
VEAEVQIDRFITDRFQSSQ

SEQ ID NO: 101536 - protein, 19 aa, synthetic construct
  source 1..19: note = Seed: VEAEVQIDRLITGRLQSLQ
VEAEHQITRFITVRLQSLQ

SEQ ID NO: 101537 - protein, 19 aa, synthetic construct
  source 1..19: note = Seed: SELVIGAVILRGHLRIAGH
SELVIGFVIHRAHLIIAGH

SEQ ID NO: 101538 - protein, 19 aa, synthetic construct
  source 1..19: note = Seed: SELVIGAVILRGHLRIAGH
SELRIGEVLLRFHLRIAGH

SEQ ID NO: 101539 - protein, 19 aa, synthetic construct
  source 1..19: note = Seed: VEAEVQIDRLITGRLQSLQ
VEAEVQIDRMITLRLQSLQ

SEQ ID NO: 101540 - protein, 19 aa, synthetic construct
  source 1..19: note = Seed: VEAEVQIDRLITGRLQSLQ
VEAEFQINRYITIRLQSLQ

SEQ ID NO: 101541 - protein, 19 aa, synthetic construct
  source 1..19: note = Seed: VEAEVQIDRLITGRLQSLQ
VEAEVQIDRWITSRFQSSQ

SEQ ID NO: 101542 - protein, 19 aa, synthetic construct
  source 1..19: note = Seed: VEAEVQIDRLITGRLQSLQ
VEAEVQIDRCITSRFQSIQ

SEQ ID NO: 101543 - protein, 19 aa, synthetic construct
  source 1..19: note = Seed: SFRLFARTRSMWSFNPETN
SFRLFARTFSMVSLNPMTN

SEQ ID NO: 101544 - protein, 19 aa, synthetic construct
  source 1..19: note = Seed: SELVIGAVILRGHLRIAGH
SELFIGQVVLRIHLRIAGH

SEQ ID NO: 101545 - protein, 19 aa, synthetic construct
  source 1..19: note = Seed: SFRLFARTRSMWSFNPETN
SFRLFARARSIWSFNPETN

SEQ ID NO: 101546 - protein, 19 aa, synthetic construct
  source 1..19: note = Seed: VEAEVQIDRLITGRLQSLQ
VEAEFQIPRFITYRLQSLQ

SEQ ID NO: 101547 - protein, 19 aa, synthetic construct
  source 1..19: note = Seed: SELVIGAVILRGHLRIAGH
SELLIGNVMLRIHLRIAGH

SEQ ID NO: 101548 - protein, 19 aa, synthetic construct
  source 1..19: note = Seed: SFRLFARTRSMWSFNPETN
SFRLFIRARSNWSFNPETN

SEQ ID NO: 101549 - protein, 19 aa, synthetic construct
  source 1..19: note = Seed: VKDCVVLHSYFTSDYYQLY
VKDCVVLHSFFTYDFYQVY

SEQ ID NO: 101550 - protein, 19 aa, synthetic construct
  source 1..19: note = Seed: SFRLFARTRSMWSFNPETN
SFRLFARARSVWSFNPETN

SEQ ID NO: 101551 - protein, 19 aa, synthetic construct
  source 1..19: note = Seed: VEAEVQIDRLITGRLQSLQ
VEAEVQIDRFITHRFQSRQ

SEQ ID NO: 101552 - protein, 19 aa, synthetic construct
  source 1..19: note = Seed: VEAEVQIDRLITGRLQSLQ
VEAEVQIDRCITARFQSIQ

SEQ ID NO: 101553 - protein, 19 aa, synthetic construct
  source 1..19: note = Seed: VEAEVQIDRLITGRLQSLQ
VEAEFQIKRYITFRLQSLQ

SEQ ID NO: 101554 - protein, 19 aa, synthetic construct
  source 1..19: note = Seed: SFRLFARTRSMWSFNPETN
SFRLFARTFSMLSFNPDTN

SEQ ID NO: 101555 - protein, 19 aa, synthetic construct
  source 1..19: note = Seed: SELVIGAVILRGHLRIAGH
SELWIGEVLLRVHLRIAGH

SEQ ID NO: 101556 - protein, 19 aa, synthetic construct
  source 1..19: note = Seed: VEAEVQIDRLITGRLQSLQ
VEAEVQIDRYITIRFQSPQ

SEQ ID NO: 101557 - protein, 19 aa, synthetic construct
  source 1..19: note = Seed: VKDCVVLHSYFTSDYYQLY
VKDCVVLHSYFTSHYFQLV

SEQ ID NO: 101558 - protein, 19 aa, synthetic construct
  source 1..19: note = Seed: SFRLFARTRSMWSFNPETN
SFRLMARERFMWVFNPETN

SEQ ID NO: 101559 - protein, 19 aa, synthetic construct
  source 1..19: note = Seed: VEAEVQIDRLITGRLQSLQ
VEAEVQIDRFITQRFQSPQ

SEQ ID NO: 101560 - protein, 19 aa, synthetic construct
  source 1..19: note = Seed: VEAEVQIDRLITGRLQSLQ
VEAEVQIDRLITTRWQSFQ

SEQ ID NO: 101561 - protein, 19 aa, synthetic construct
  source 1..19: note = Seed: SFRLFARTRSMWSFNPETN
SFRIFAFTASMRSFNPETN

SEQ ID NO: 101562 - protein, 19 aa, synthetic construct
  source 1..19: note = Seed: SELVIGAVILRGHLRIAGH
SELLIGEVMLREHLRIAGH

SEQ ID NO: 101563 - protein, 19 aa, synthetic construct
  source 1..19: note = Seed: VEAEVQIDRLITGRLQSLQ
VEAEVQIDRFITTRMQSNQ

SEQ ID NO: 101564 - protein, 19 aa, synthetic construct
  source 1..19: note = Seed: SELVIGAVILRGHLRIAGH
SELMIGYVILRMHLRIAGH

SEQ ID NO: 101565 - protein, 19 aa, synthetic construct
  source 1..19: note = Seed: VKDCVVLHSYFTSDYYQLY
VKDCVVLHSFFTYDFYQAY

SEQ ID NO: 101566 - protein, 19 aa, synthetic construct
  source 1..19: note = Seed: VEAEVQIDRLITGRLQSLQ
VEAEVQIDRIITIRMQSFQ

SEQ ID NO: 101567 - protein, 19 aa, synthetic construct
  source 1..19: note = Seed: VEAEVQIDRLITGRLQSLQ
VEAEVQIDRVITTRYQSIQ

SEQ ID NO: 101568 - protein, 19 aa, synthetic construct
  source 1..19: note = Seed: VEAEVQIDRLITGRLQSLQ
VEAEVQIDRFITHRLQSAQ

SEQ ID NO: 101569 - protein, 19 aa, synthetic construct
  source 1..19: note = Seed: VEAEVQIDRLITGRLQSLQ
VEAEMQIFRAITARLQSLQ

SEQ ID NO: 101570 - protein, 19 aa, synthetic construct
  source 1..19: note = Seed: VEAEVQIDRLITGRLQSLQ
VEAEVQIDRMITERFQSMQ

SEQ ID NO: 101571 - protein, 19 aa, synthetic construct
  source 1..19: note = Seed: VEAEVQIDRLITGRLQSLQ
VEAEVQIDRWITERFQSAQ

SEQ ID NO: 101572 - protein, 19 aa, synthetic construct
  source 1..19: note = Seed: VEAEVQIDRLITGRLQSLQ
VEAEVQIDRYITERYQSIQ

SEQ ID NO: 101573 - protein, 19 aa, synthetic construct
  source 1..19: note = Seed: SELVIGAVILRGHLRIAGH
SELLIGSVMLRAHLRIAGH

SEQ ID NO: 101574 - protein, 19 aa, synthetic construct
  source 1..19: note = Seed: VEAEVQIDRLITGRLQSLQ
VEAEHQISRFITLRLQSLQ

SEQ ID NO: 101575 - protein, 19 aa, synthetic construct
  source 1..19: note = Seed: SELVIGAVILRGHLRIAGH
SELRIGEVILRFHLRIAGH

SEQ ID NO: 101576 - protein, 19 aa, synthetic construct
  source 1..19: note = Seed: VKDCVVLHSYFTSDYYQLY
VKDCVVLHSFFTNDFYQIY

SEQ ID NO: 101577 - protein, 19 aa, synthetic construct
  source 1..19: note = Seed: SELVIGAVILRGHLRIAGH
SELFIGEVYLRGHLRIAGH

SEQ ID NO: 101578 - protein, 19 aa, synthetic construct
  source 1..19: note = Seed: VEAEVQIDRLITGRLQSLQ
VEAEVQIDRWITGRFQSIQ

SEQ ID NO: 101579 - protein, 19 aa, synthetic construct
  source 1..19: note = Seed: SELVIGAVILRGHLRIAGH
SELRIGTVLLRVHLRIAGH

SEQ ID NO: 101580 - protein, 19 aa, synthetic construct
  source 1..19: note = Seed: VEAEVQIDRLITGRLQSLQ
VEAEVQIDRWITGRFQSLQ

SEQ ID NO: 101581 - protein, 19 aa, synthetic construct
  source 1..19: note = Seed: VEAEVQIDRLITGRLQSLQ
VEAEYQITRFITRRLQSLQ

SEQ ID NO: 101582 - protein, 19 aa, synthetic construct
  source 1..19: note = Seed: VEAEVQIDRLITGRLQSLQ
VEAEVQIDRCITSRFQSVQ

SEQ ID NO: 101583 - protein, 19 aa, synthetic construct
  source 1..19: note = Seed: SELVIGAVILRGHLRIAGH
SELLIGHVILRIHLRIAGH

SEQ ID NO: 101584 - protein, 19 aa, synthetic construct
  source 1..19: note = Seed: VKDCVVLHSYFTSDYYQLY
VKDCVVLHSFFTNDFYQLY

SEQ ID NO: 101585 - protein, 19 aa, synthetic construct
  source 1..19: note = Seed: GAGAALQIPFAMQMAYRFN
GAGAALQIPFAMHMFYRFN

SEQ ID NO: 101586 - protein, 19 aa, synthetic construct
  source 1..19: note = Seed: SFRLFARTRSMWSFNPETN
SFRLFIRARSAWSFNPETN

SEQ ID NO: 101587 - protein, 19 aa, synthetic construct
  source 1..19: note = Seed: SELVIGAVILRGHLRIAGH
SELFIGNVILRAHLRIAGH

SEQ ID NO: 101588 - protein, 19 aa, synthetic construct
  source 1..19: note = Seed: VEAEVQIDRLITGRLQSLQ
VEAEVQINRFITIRLQSLQ

SEQ ID NO: 101589 - protein, 19 aa, synthetic construct
  source 1..19: note = Seed: VEAEVQIDRLITGRLQSLQ
VEAEVQIMRSITARLQSLQ

SEQ ID NO: 101590 - protein, 19 aa, synthetic construct
  source 1..19: note = Seed: SELVIGAVILRGHLRIAGH
SELVIGFVIMRPHLLIAGH

SEQ ID NO: 101591 - protein, 19 aa, synthetic construct
  source 1..19: note = Seed: VEAEVQIDRLITGRLQSLQ
VEAEVQIDRWITGRFQSVQ

SEQ ID NO: 101592 - protein, 19 aa, synthetic construct
  source 1..19: note = Seed: VEAEVQIDRLITGRLQSLQ
VEAEIQIIRSITARLQSLQ

SEQ ID NO: 101593 - protein, 19 aa, synthetic construct
  source 1..19: note = Seed: VEAEVQIDRLITGRLQSLQ
VEAEVQIDRLITIRFQSRQ

SEQ ID NO: 101594 - protein, 19 aa, synthetic construct
  source 1..19: note = Seed: SELVIGAVILRGHLRIAGH
SELLIGHVILRAHLRIAGH

SEQ ID NO: 101595 - protein, 19 aa, synthetic construct
  source 1..19: note = Seed: VEAEVQIDRLITGRLQSLQ
VEAELQIVRKITHRLQSLQ

SEQ ID NO: 101596 - protein, 19 aa, synthetic construct
  source 1..19: note = Seed: SFRLFARTRSMWSFNPETN
SFRLFARTLSMFSINPATN

SEQ ID NO: 101597 - protein, 19 aa, synthetic construct
  source 1..19: note = Seed: GAGAALQIPFAMQMAYRFN
GAGAALQIPFAMTMFYRIN

SEQ ID NO: 101598 - protein, 19 aa, synthetic construct
  source 1..19: note = Seed: SELVIGAVILRGHLRIAGH
SELFIGAVPLRVHLRIAGH

SEQ ID NO: 101599 - protein, 19 aa, synthetic construct
  source 1..19: note = Seed: GAGAALQIPFAMQMAYRFN
GAGAALQIPFAMSMYYRIN

SEQ ID NO: 101600 - protein, 19 aa, synthetic construct
  source 1..19: note = Seed: SELVIGAVILRGHLRIAGH
SELFIGQVILRSHLRIAGH

SEQ ID NO: 101601 - protein, 19 aa, synthetic construct
  source 1..19: note = Seed: GAGAALQIPFAMQMAYRFN
GAGAALQIPFAMTMFYRTN

SEQ ID NO: 101602 - protein, 19 aa, synthetic construct
  source 1..19: note = Seed: GAGAALQIPFAMQMAYRFN
GAGAALQIPFAMTMFYRLN

SEQ ID NO: 101603 - protein, 19 aa, synthetic construct
  source 1..19: note = Seed: SELVIGAVILRGHLRIAGH
SELFIGDVILRAHLRIAGH

SEQ ID NO: 101604 - protein, 19 aa, synthetic construct
  source 1..19: note = Seed: GAGAALQIPFAMQMAYRFN
GAGAALQIPFAMPMFYRIN

SEQ ID NO: 101605 - protein, 19 aa, synthetic construct
  source 1..19: note = Seed: VKDCVVLHSYFTSDYYQLY
VKDCHVLHSFFTIDYYQLY

SEQ ID NO: 101606 - protein, 19 aa, synthetic construct
  source 1..19: note = Seed: SELVIGAVILRGHLRIAGH
SELFIGWVILRAHLRIAGH

SEQ ID NO: 101607 - protein, 19 aa, synthetic construct
  source 1..19: note = Seed: VEAEVQIDRLITGRLQSLQ
VEAEIQIHRYITIRLQSLQ

SEQ ID NO: 101608 - protein, 19 aa, synthetic construct
  source 1..19: note = Seed: SELVIGAVILRGHLRIAGH
SELFIGSVALRVHLRIAGH

SEQ ID NO: 101609 - protein, 19 aa, synthetic construct
  source 1..19: note = Seed: SFRLFARTRSMWSFNPETN
SFRLFARTFSMRSFNPITN

SEQ ID NO: 101610 - protein, 19 aa, synthetic construct
  source 1..19: note = Seed: VEAEVQIDRLITGRLQSLQ
VEAEVQIDRYITYRFQSAQ

SEQ ID NO: 101611 - protein, 19 aa, synthetic construct
  source 1..19: note = Seed: SELVIGAVILRGHLRIAGH
SELVIGFVIMRSHLRIAGH

SEQ ID NO: 101612 - protein, 19 aa, synthetic construct
  source 1..19: note = Seed: SELVIGAVILRGHLRIAGH
SELFIGEVVLRSHLRIAGH

SEQ ID NO: 101613 - protein, 19 aa, synthetic construct
  source 1..19: note = Seed: SELVIGAVILRGHLRIAGH
SELFIGTVILRAHLRIAGH

SEQ ID NO: 101614 - protein, 19 aa, synthetic construct
  source 1..19: note = Seed: SELVIGAVILRGHLRIAGH
SELRIGTVILRYHLRIAGH

SEQ ID NO: 101615 - protein, 19 aa, synthetic construct
  source 1..19: note = Seed: SELVIGAVILRGHLRIAGH
SELVIGFVIHRAHLMIAGH

SEQ ID NO: 101616 - protein, 19 aa, synthetic construct
  source 1..19: note = Seed: SELVIGAVILRGHLRIAGH
SELFIGQVMLRAHLRIAGH

SEQ ID NO: 101617 - protein, 19 aa, synthetic construct
  source 1..19: note = Seed: SELVIGAVILRGHLRIAGH
SELVIGIVIHRAHLLIAGH

SEQ ID NO: 101618 - protein, 19 aa, synthetic construct
  source 1..19: note = Seed: GAGAALQIPFAMQMAYRFN
GAGAAFQIRFFMQIAYRFN

SEQ ID NO: 101619 - protein, 19 aa, synthetic construct
  source 1..19: note = Seed: GAGAALQIPFAMQMAYRFN
GAGAALQIPFAMSMFYRMN

SEQ ID NO: 101620 - protein, 19 aa, synthetic construct
  source 1..19: note = Seed: VEAEVQIDRLITGRLQSLQ
VEAEVQIDRYITHRFQSWQ

SEQ ID NO: 101621 - protein, 19 aa, synthetic construct
  source 1..19: note = Seed: SELVIGAVILRGHLRIAGH
SELFIGNVMLRAHLRIAGH

SEQ ID NO: 101622 - protein, 19 aa, synthetic construct
  source 1..19: note = Seed: GAGAALQIPFAMQMAYRFN
GAGAALQIPFAMPMFYRLN

SEQ ID NO: 101623 - protein, 19 aa, synthetic construct
  source 1..19: note = Seed: SELVIGAVILRGHLRIAGH
SELVIGFVISRPHLLIAGH

SEQ ID NO: 101624 - protein, 19 aa, synthetic construct
  source 1..19: note = Seed: VEAEVQIDRLITGRLQSLQ
VEAEVQILRNITARLQSLQ

SEQ ID NO: 101625 - protein, 19 aa, synthetic construct
  source 1..19: note = Seed: VKDCVVLHSYFTSDYYQLY
VKDCVVLHSLFTSDFYQLY

SEQ ID NO: 101626 - protein, 19 aa, synthetic construct
  source 1..19: note = Seed: SELVIGAVILRGHLRIAGH
SELYIGMVYLRNHLRIAGH

SEQ ID NO: 101627 - protein, 19 aa, synthetic construct
  source 1..19: note = Seed: GAGAALQIPFAMQMAYRFN
GAGAALQIPFAMAMFYRVN

SEQ ID NO: 101628 - protein, 19 aa, synthetic construct
  source 1..19: note = Seed: GAGAALQIPFAMQMAYRFN
GAGAALQIPFAMNMFYRIN

SEQ ID NO: 101629 - protein, 19 aa, synthetic construct
  source 1..19: note = Seed: GAGAALQIPFAMQMAYRFN
GAGAALQIPFAMSMFYRTN

SEQ ID NO: 101630 - protein, 19 aa, synthetic construct
  source 1..19: note = Seed: SELVIGAVILRGHLRIAGH
SELYIGHVILRAHLRIAGH

SEQ ID NO: 101631 - protein, 19 aa, synthetic construct
  source 1..19: note = Seed: GAGAALQIPFAMQMAYRFN
GAGAALQIPFAMSMFYRFN

SEQ ID NO: 101632 - protein, 19 aa, synthetic construct
  source 1..19: note = Seed: GAGAALQIPFAMQMAYRFN
GAGAALQIPFAMSMFYRNN

SEQ ID NO: 101633 - protein, 19 aa, synthetic construct
  source 1..19: note = Seed: VKDCVVLHSYFTSDYYQLY
VKDCVVLHSFFTADFYQSY

SEQ ID NO: 101634 - protein, 19 aa, synthetic construct
  source 1..19: note = Seed: SELVIGAVILRGHLRIAGH
SELFIGSVALRAHLRIAGH

SEQ ID NO: 101635 - protein, 19 aa, synthetic construct
  source 1..19: note = Seed: SELVIGAVILRGHLRIAGH
SELVIGFVIHRAHLRIAGH

SEQ ID NO: 101636 - protein, 19 aa, synthetic construct
  source 1..19: note = Seed: GAGAALQIPFAMQMAYRFN
GAGAALQIPFAMSMYYRVN

SEQ ID NO: 101637 - protein, 19 aa, synthetic construct
  source 1..19: note = Seed: VEAEVQIDRLITGRLQSLQ
VEAEFQIHRLITMRLQSLQ

SEQ ID NO: 101638 - protein, 19 aa, synthetic construct
  source 1..19: note = Seed: GAGAALQIPFAMQMAYRFN
GAGAALQIPYAMSMFYRLN

SEQ ID NO: 101639 - protein, 19 aa, synthetic construct
  source 1..19: note = Seed: SELVIGAVILRGHLRIAGH
SELFIGAVPLRIHLRIAGH

SEQ ID NO: 101640 - protein, 19 aa, synthetic construct
  source 1..19: note = Seed: SELVIGAVILRGHLRIAGH
SELRIGTVMLRIHLRIAGH

SEQ ID NO: 101641 - protein, 19 aa, synthetic construct
  source 1..19: note = Seed: SELVIGAVILRGHLRIAGH
SELFIGAVPLRAHLRIAGH

SEQ ID NO: 101642 - protein, 19 aa, synthetic construct
  source 1..19: note = Seed: VEAEVQIDRLITGRLQSLQ
VEAEMQINRFITMRLQSLQ

SEQ ID NO: 101643 - protein, 19 aa, synthetic construct
  source 1..19: note = Seed: VKDCVVLHSYFTSDYYQLY
VKDCVVLHSFFTKDFYQVY

SEQ ID NO: 101644 - protein, 19 aa, synthetic construct
  source 1..19: note = Seed: SELVIGAVILRGHLRIAGH
SELMIGHVILRVHLRIAGH

SEQ ID NO: 101645 - protein, 19 aa, synthetic construct
  source 1..19: note = Seed: GAGAALQIPFAMQMAYRFN
GAGAALQIPFAMAMFYRLN

SEQ ID NO: 101646 - protein, 19 aa, synthetic construct
  source 1..19: note = Seed: VEAEVQIDRLITGRLQSLQ
VEAEIQIIRSITYRLQSLQ

SEQ ID NO: 101647 - protein, 19 aa, synthetic construct
  source 1..19: note = Seed: VEAEVQIDRLITGRLQSLQ
VEAEFQINRLITLRLQSLQ

SEQ ID NO: 101648 - protein, 19 aa, synthetic construct
  source 1..19: note = Seed: GAGAALQIPFAMQMAYRFN
GAGAALQIPFAMTMFYRNN

SEQ ID NO: 101649 - protein, 19 aa, synthetic construct
  source 1..19: note = Seed: VEAEVQIDRLITGRLQSLQ
VEAEVQIDRLITERLQSLQ

SEQ ID NO: 101650 - protein, 19 aa, synthetic construct
  source 1..19: note = Seed: SELVIGAVILRGHLRIAGH
SELFIGSVPLRVHLRIAGH

SEQ ID NO: 101651 - protein, 19 aa, synthetic construct
  source 1..19: note = Seed: GAGAALQIPFAMQMAYRFN
GAGAALQIPYAMTMFYRLN

SEQ ID NO: 101652 - protein, 19 aa, synthetic construct
  source 1..19: note = Seed: GAGAALQIPFAMQMAYRFN
GAGAALQIPFAMEMFYRVN

SEQ ID NO: 101653 - protein, 19 aa, synthetic construct
  source 1..19: note = Seed: SELVIGAVILRGHLRIAGH
SELPIGAVVLRAHLRIAGH

SEQ ID NO: 101654 - protein, 19 aa, synthetic construct
  source 1..19: note = Seed: SELVIGAVILRGHLRIAGH
SELVIGIVIHRAHLVIAGH

SEQ ID NO: 101655 - protein, 19 aa, synthetic construct
  source 1..19: note = Seed: VKDCVVLHSYFTSDYYQLY
VKDCVVLHSYFTHDFYQLY

SEQ ID NO: 101656 - protein, 19 aa, synthetic construct
  source 1..19: note = Seed: GAGAALQIPFAMQMAYRFN
GAGAALQIPFAMAMFYRIN

SEQ ID NO: 101657 - protein, 19 aa, synthetic construct
  source 1..19: note = Seed: GAGAALQIPFAMQMAYRFN
GAGAALQIPYAMTMFYRIN

SEQ ID NO: 101658 - protein, 19 aa, synthetic construct
  source 1..19: note = Seed: GAGAALQIPFAMQMAYRFN
GAGAALQIPFAMTMFYRFN

SEQ ID NO: 101659 - protein, 19 aa, synthetic construct
  source 1..19: note = Seed: GAGAALQIPFAMQMAYRFN
GAGAALNIPAAIQMAYRFN

SEQ ID NO: 101660 - protein, 19 aa, synthetic construct
  source 1..19: note = Seed: GAGAALQIPFAMQMAYRFN
GAGAALQIPFAMNMFYRLN

SEQ ID NO: 101661 - protein, 19 aa, synthetic construct
  source 1..19: note = Seed: GAGAALQIPFAMQMAYRFN
GAGAALQIPFAMTMFYRPN

SEQ ID NO: 101662 - protein, 19 aa, synthetic construct
  source 1..19: note = Seed: VKDCVVLHSYFTSDYYQLY
VKDCVVLHSFFTHDFYQTY

SEQ ID NO: 101663 - protein, 19 aa, synthetic construct
  source 1..19: note = Seed: SELVIGAVILRGHLRIAGH
SELVIGFVIFRAHLRIAGH

SEQ ID NO: 101664 - protein, 19 aa, synthetic construct
  source 1..19: note = Seed: GAGAALQIPFAMQMAYRFN
GAGAALQIPFAMKMFYRLN

SEQ ID NO: 101665 - protein, 19 aa, synthetic construct
  source 1..19: note = Seed: GAGAALQIPFAMQMAYRFN
GAGAALQIPFAMTMYYRVN

SEQ ID NO: 101666 - protein, 19 aa, synthetic construct
  source 1..19: note = Seed: SELVIGAVILRGHLRIAGH
SELRIGTVMLRLHLRIAGH

SEQ ID NO: 101667 - protein, 19 aa, synthetic construct
  source 1..19: note = Seed: GAGAALQIPFAMQMAYRFN
GAGAALQIPYAMHMFYRLN

SEQ ID NO: 101668 - protein, 19 aa, synthetic construct
  source 1..19: note = Seed: GAGAALQIPFAMQMAYRFN
GAGAALQIPYAMHMFYRVN

SEQ ID NO: 101669 - protein, 19 aa, synthetic construct
  source 1..19: note = Seed: VEAEVQIDRLITGRLQSLQ
VEAEFQINRYITMRLQSLQ

SEQ ID NO: 101670 - protein, 19 aa, synthetic construct
  source 1..19: note = Seed: VKDCVVLHSYFTSDYYQLY
VKDCVVLHSYFTHDFYQVY

SEQ ID NO: 101671 - protein, 19 aa, synthetic construct
  source 1..19: note = Seed: SELVIGAVILRGHLRIAGH
SELVIGFVIARNHLAIAGH

SEQ ID NO: 101672 - protein, 19 aa, synthetic construct
  source 1..19: note = Seed: SELVIGAVILRGHLRIAGH
SELNIGVVMLRAHLRIAGH

SEQ ID NO: 101673 - protein, 19 aa, synthetic construct
  source 1..19: note = Seed: SELVIGAVILRGHLRIAGH
SELVIGFVIFRPHLRIAGH

SEQ ID NO: 101674 - protein, 19 aa, synthetic construct
  source 1..19: note = Seed: SELVIGAVILRGHLRIAGH
SELVIGIVIMRPHLLIAGH

SEQ ID NO: 101675 - protein, 19 aa, synthetic construct
  source 1..19: note = Seed: VEAEVQIDRLITGRLQSLQ
VEAEIQILRRITTRLQSLQ

SEQ ID NO: 101676 - protein, 19 aa, synthetic construct
  source 1..19: note = Seed: GAGAALQIPFAMQMAYRFN
GAGAALQIPFAMAMFYRTN

SEQ ID NO: 101677 - protein, 19 aa, synthetic construct
  source 1..19: note = Seed: GAGAALQIPFAMQMAYRFN
GAGAALQIPYAMHMFYRIN

SEQ ID NO: 101678 - protein, 19 aa, synthetic construct
  source 1..19: note = Seed: VEAEVQIDRLITGRLQSLQ
VEAEIQIIRSITLRLQSLQ

SEQ ID NO: 101679 - protein, 19 aa, synthetic construct
  source 1..19: note = Seed: GAGAALQIPFAMQMAYRFN
GAGAALIIPAAIQMAYRFN

SEQ ID NO: 101680 - protein, 19 aa, synthetic construct
  source 1..19: note = Seed: SELVIGAVILRGHLRIAGH
SELVIGFVIQRPHLVIAGH

SEQ ID NO: 101681 - protein, 19 aa, synthetic construct
  source 1..19: note = Seed: GAGAALQIPFAMQMAYRFN
GAGAALQIPFAMSMFYRYN

SEQ ID NO: 101682 - protein, 19 aa, synthetic construct
  source 1..19: note = Seed: SELVIGAVILRGHLRIAGH
SELFIGGVILRAHLRIAGH

SEQ ID NO: 101683 - protein, 19 aa, synthetic construct
  source 1..19: note = Seed: GAGAALQIPFAMQMAYRFN
GAGAARQIHFFMQLAYRFN

SEQ ID NO: 101684 - protein, 19 aa, synthetic construct
  source 1..19: note = Seed: VKDCVVLHSYFTSDYYQLY
VKDCVVLHSYFTSDFYQMY

SEQ ID NO: 101685 - protein, 19 aa, synthetic construct
  source 1..19: note = Seed: SELVIGAVILRGHLRIAGH
SELFIGAVALRVHLRIAGH

SEQ ID NO: 101686 - protein, 19 aa, synthetic construct
  source 1..19: note = Seed: VKDCVVLHSYFTSDYYQLY
VKDCFVLSSFFTRDYYQLY

SEQ ID NO: 101687 - protein, 19 aa, synthetic construct
  source 1..19: note = Seed: SELVIGAVILRGHLRIAGH
SELNIGAVALRAHLRIAGH

SEQ ID NO: 101688 - protein, 19 aa, synthetic construct
  source 1..19: note = Seed: SELVIGAVILRGHLRIAGH
SELRIGTVILRLHLRIAGH

SEQ ID NO: 101689 - protein, 19 aa, synthetic construct
  source 1..19: note = Seed: SELVIGAVILRGHLRIAGH
SELFIGEVMLRDHLRIAGH

SEQ ID NO: 101690 - protein, 19 aa, synthetic construct
  source 1..19: note = Seed: GAGAALQIPFAMQMAYRFN
GAGAALQIPFAMEMFYRIN

SEQ ID NO: 101691 - protein, 19 aa, synthetic construct
  source 1..19: note = Seed: SELVIGAVILRGHLRIAGH
SELIIGHVILRAHLRIAGH

SEQ ID NO: 101692 - protein, 19 aa, synthetic construct
  source 1..19: note = Seed: GAGAALQIPFAMQMAYRFN
GAGAALIIPAAAQMAYRFN

SEQ ID NO: 101693 - protein, 19 aa, synthetic construct
  source 1..19: note = Seed: SELVIGAVILRGHLRIAGH
SELIIGHVILRIHLRIAGH

SEQ ID NO: 101694 - protein, 19 aa, synthetic construct
  source 1..19: note = Seed: SELVIGAVILRGHLRIAGH
SELAIGGVILRAHLRIAGH

SEQ ID NO: 101695 - protein, 19 aa, synthetic construct
  source 1..19: note = Seed: SELVIGAVILRGHLRIAGH
SELIIGAVPLRVHLRIAGH

SEQ ID NO: 101696 - protein, 19 aa, synthetic construct
  source 1..19: note = Seed: GAGAALQIPFAMQMAYRFN
GAGAALQIPFAMHMFYRTN

SEQ ID NO: 101697 - protein, 19 aa, synthetic construct
  source 1..19: note = Seed: GAGAALQIPFAMQMAYRFN
GAGAALQIPYAMEMFYRLN

SEQ ID NO: 101698 - protein, 19 aa, synthetic construct
  source 1..19: note = Seed: SELVIGAVILRGHLRIAGH
SELFIGGVVLRVHLRIAGH

SEQ ID NO: 101699 - protein, 19 aa, synthetic construct
  source 1..19: note = Seed: GAGAALQIPFAMQMAYRFN
GAGAALQIPFAMQMFYRVN

SEQ ID NO: 101700 - protein, 19 aa, synthetic construct
  source 1..19: note = Seed: SELVIGAVILRGHLRIAGH
SELRIGSVMLRIHLRIAGH

SEQ ID NO: 101701 - protein, 19 aa, synthetic construct
  source 1..19: note = Seed: SELVIGAVILRGHLRIAGH
SELFIGLVILRDHLRIAGH

SEQ ID NO: 101702 - protein, 19 aa, synthetic construct
  source 1..19: note = Seed: VKDCVVLHSYFTSDYYQLY
VKDCVVLHSFFTHDLYQVY

SEQ ID NO: 101703 - protein, 19 aa, synthetic construct
  source 1..19: note = Seed: SELVIGAVILRGHLRIAGH
SELIIGSVALRAHLRIAGH

SEQ ID NO: 101704 - protein, 19 aa, synthetic construct
  source 1..19: note = Seed: SELVIGAVILRGHLRIAGH
SELFIGMVILRDHLRIAGH

SEQ ID NO: 101705 - protein, 19 aa, synthetic construct
  source 1..19: note = Seed: GAGAALQIPFAMQMAYRFN
GAGAALQIPFAMTMFYRYN

SEQ ID NO: 101706 - protein, 19 aa, synthetic construct
  source 1..19: note = Seed: SFRLFARTRSMWSFNPETN
SFRLFARIRSMWAFNPETN

SEQ ID NO: 101707 - protein, 19 aa, synthetic construct
  source 1..19: note = Seed: GAGAALQIPFAMQMAYRFN
GAGAALQIPFAMQMFYRLN

SEQ ID NO: 101708 - protein, 19 aa, synthetic construct
  source 1..19: note = Seed: GAGAALQIPFAMQMAYRFN
GAGAAFQIKFFMQHAYRFN

SEQ ID NO: 101709 - protein, 19 aa, synthetic construct
  source 1..19: note = Seed: GAGAALQIPFAMQMAYRFN
GAGAALQIPFAMNMFYRFN

SEQ ID NO: 101710 - protein, 19 aa, synthetic construct
  source 1..19: note = Seed: GAGAALQIPFAMQMAYRFN
GAGAALQIPLAMSMFYRVN

SEQ ID NO: 101711 - protein, 19 aa, synthetic construct
  source 1..19: note = Seed: SELVIGAVILRGHLRIAGH
SELRIGTVILRFHLRIAGH

SEQ ID NO: 101712 - protein, 19 aa, synthetic construct
  source 1..19: note = Seed: VKDCVVLHSYFTSDYYQLY
VKDCVVLHSYFTTDFYQMY

SEQ ID NO: 101713 - protein, 19 aa, synthetic construct
  source 1..19: note = Seed: SFRLFARTRSMWSFNPETN
SFRLFARSRIMWIFNPETN

SEQ ID NO: 101714 - protein, 19 aa, synthetic construct
  source 1..19: note = Seed: SELVIGAVILRGHLRIAGH
SELVIGIVIHRNHLLIAGH

SEQ ID NO: 101715 - protein, 19 aa, synthetic construct
  source 1..19: note = Seed: SELVIGAVILRGHLRIAGH
SELFIGAVPLRMHLRIAGH

SEQ ID NO: 101716 - protein, 19 aa, synthetic construct
  source 1..19: note = Seed: SFRLFARTRSMWSFNPETN
SFRLIARIRRMWAFNPETN

SEQ ID NO: 101717 - protein, 19 aa, synthetic construct
  source 1..19: note = Seed: SELVIGAVILRGHLRIAGH
SELIIGSVPLRVHLRIAGH

SEQ ID NO: 101718 - protein, 19 aa, synthetic construct
  source 1..19: note = Seed: SFRLFARTRSMWSFNPETN
SFRLMARMRNMWSFNPETN

SEQ ID NO: 101719 - protein, 19 aa, synthetic construct
  source 1..19: note = Seed: SELVIGAVILRGHLRIAGH
SELNIGGVALRAHLRIAGH

SEQ ID NO: 101720 - protein, 19 aa, synthetic construct
  source 1..19: note = Seed: GAGAALQIPFAMQMAYRFN
GAGAALQIPFAMPMFYRFN

SEQ ID NO: 101721 - protein, 19 aa, synthetic construct
  source 1..19: note = Seed: VEAEVQIDRLITGRLQSLQ
VEAELQIFRAITRRLQSLQ

SEQ ID NO: 101722 - protein, 19 aa, synthetic construct
  source 1..19: note = Seed: SELVIGAVILRGHLRIAGH
SELIIGAVPLRIHLRIAGH

SEQ ID NO: 101723 - protein, 19 aa, synthetic construct
  source 1..19: note = Seed: SFRLFARTRSMWSFNPETN
SFRLYARIRSMWAFNPETN

SEQ ID NO: 101724 - protein, 19 aa, synthetic construct
  source 1..19: note = Seed: SELVIGAVILRGHLRIAGH
SELNIGIVILRAHLRIAGH

SEQ ID NO: 101725 - protein, 19 aa, synthetic construct
  source 1..19: note = Seed: SELVIGAVILRGHLRIAGH
SELFIGSVILRNHLRIAGH

SEQ ID NO: 101726 - protein, 19 aa, synthetic construct
  source 1..19: note = Seed: SELVIGAVILRGHLRIAGH
SELFIGGVALRIHLRIAGH

SEQ ID NO: 101727 - protein, 19 aa, synthetic construct
  source 1..19: note = Seed: SELVIGAVILRGHLRIAGH
SELIIGMVTLRPHLRIAGH

SEQ ID NO: 101728 - protein, 19 aa, synthetic construct
  source 1..19: note = Seed: SELVIGAVILRGHLRIAGH
SELFIGEVILRHHLRIAGH

SEQ ID NO: 101729 - protein, 19 aa, synthetic construct
  source 1..19: note = Seed: GAGAALQIPFAMQMAYRFN
GAGAALQIPFAMKMFYRFN

SEQ ID NO: 101730 - protein, 19 aa, synthetic construct
  source 1..19: note = Seed: SELVIGAVILRGHLRIAGH
SELVIGIVIARPHLVIAGH

SEQ ID NO: 101731 - protein, 19 aa, synthetic construct
  source 1..19: note = Seed: SELVIGAVILRGHLRIAGH
SELAIGAVALRAHLRIAGH

SEQ ID NO: 101732 - protein, 19 aa, synthetic construct
  source 1..19: note = Seed: SFRLFARTRSMWSFNPETN
SFRLFARARTMWAFNPETN

SEQ ID NO: 101733 - protein, 19 aa, synthetic construct
  source 1..19: note = Seed: GAGAALQIPFAMQMAYRFN
GAGAALQIPFAMHMFYRAN

SEQ ID NO: 101734 - protein, 19 aa, synthetic construct
  source 1..19: note = Seed: GAGAALQIPFAMQMAYRFN
GAGAALQIPFAMHMFYRNN

SEQ ID NO: 101735 - protein, 19 aa, synthetic construct
  source 1..19: note = Seed: GAGAALQIPFAMQMAYRFN
GAGAALQIPFAMSMFYREN

SEQ ID NO: 101736 - protein, 19 aa, synthetic construct
  source 1..19: note = Seed: VEAEVQIDRLITGRLQSLQ
VEAEIQIHRAITFRLQSLQ

SEQ ID NO: 101737 - protein, 19 aa, synthetic construct
  source 1..19: note = Seed: VEAEVQIDRLITGRLQSLQ
VEAEIQIIRRITIRLQSLQ

SEQ ID NO: 101738 - protein, 19 aa, synthetic construct
  source 1..19: note = Seed: SELVIGAVILRGHLRIAGH
SELVIGIVIMRSHLRIAGH

SEQ ID NO: 101739 - protein, 19 aa, synthetic construct
  source 1..19: note = Seed: SELVIGAVILRGHLRIAGH
SELPIGAVILRSHLRIAGH

SEQ ID NO: 101740 - protein, 19 aa, synthetic construct
  source 1..19: note = Seed: VEAEVQIDRLITGRLQSLQ
VEAEIQIIRNITYRLQSLQ

SEQ ID NO: 101741 - protein, 19 aa, synthetic construct
  source 1..19: note = Seed: SELVIGAVILRGHLRIAGH
SELIIGAVPLRSHLRIAGH

SEQ ID NO: 101742 - protein, 19 aa, synthetic construct
  source 1..19: note = Seed: GAGAALQIPFAMQMAYRFN
GAGAALQIPFAMEMFYRFN

SEQ ID NO: 101743 - protein, 19 aa, synthetic construct
  source 1..19: note = Seed: VKDCVVLHSYFTSDYYQLY
VKDCVVLHSFFTTDYYQAY

SEQ ID NO: 101744 - protein, 19 aa, synthetic construct
  source 1..19: note = Seed: SELVIGAVILRGHLRIAGH
SELTIGAVALRAHLRIAGH

SEQ ID NO: 101745 - protein, 19 aa, synthetic construct
  source 1..19: note = Seed: SELVIGAVILRGHLRIAGH
SELLIGYVDLRAHLRIAGH

SEQ ID NO: 101746 - protein, 19 aa, synthetic construct
  source 1..19: note = Seed: SELVIGAVILRGHLRIAGH
SELVIGIVIQRNHLVIAGH

SEQ ID NO: 101747 - protein, 19 aa, synthetic construct
  source 1..19: note = Seed: SFRLFARTRSMWSFNPETN
SFRLFARARAMWVFNPETN

SEQ ID NO: 101748 - protein, 19 aa, synthetic construct
  source 1..19: note = Seed: VEAEVQIDRLITGRLQSLQ
VEAEYQIFRRITMRLQSLQ

SEQ ID NO: 101749 - protein, 19 aa, synthetic construct
  source 1..19: note = Seed: GAGAALQIPFAMQMAYRFN
GAGAALQIPFAMTMFYRSN

SEQ ID NO: 101750 - protein, 19 aa, synthetic construct
  source 1..19: note = Seed: SFRLFARTRSMWSFNPETN
SFRLFARSRAMWIFNPETN

SEQ ID NO: 101751 - protein, 19 aa, synthetic construct
  source 1..19: note = Seed: SELVIGAVILRGHLRIAGH
SELIIGSVALRVHLRIAGH

SEQ ID NO: 101752 - protein, 19 aa, synthetic construct
  source 1..19: note = Seed: GAGAALQIPFAMQMAYRFN
GAGAALQIPYAMSMFYRTN

SEQ ID NO: 101753 - protein, 19 aa, synthetic construct
  source 1..19: note = Seed: GAGAALQIPFAMQMAYRFN
GAGAALQIPFAMHMYYRIN

SEQ ID NO: 101754 - protein, 19 aa, synthetic construct
  source 1..19: note = Seed: SELVIGAVILRGHLRIAGH
SELFIGSVVLRSHLRIAGH

SEQ ID NO: 101755 - protein, 19 aa, synthetic construct
  source 1..19: note = Seed: GAGAALQIPFAMQMAYRFN
GAGAALQIPFAMAMYYRVN

SEQ ID NO: 101756 - protein, 19 aa, synthetic construct
  source 1..19: note = Seed: GAGAALQIPFAMQMAYRFN
GAGAALQIPFAMHMFYRYN

SEQ ID NO: 101757 - protein, 19 aa, synthetic construct
  source 1..19: note = Seed: VKDCVVLHSYFTSDYYQLY
VKDCVVLHSFFTNDFYQAY

SEQ ID NO: 101758 - protein, 19 aa, synthetic construct
  source 1..19: note = Seed: SELVIGAVILRGHLRIAGH
SELMIGSVILRAHLRIAGH

SEQ ID NO: 101759 - protein, 19 aa, synthetic construct
  source 1..19: note = Seed: SELVIGAVILRGHLRIAGH
SELIIGSVALRSHLRIAGH

SEQ ID NO: 101760 - protein, 19 aa, synthetic construct
  source 1..19: note = Seed: SELVIGAVILRGHLRIAGH
SELFIGSVALRNHLRIAGH

SEQ ID NO: 101761 - protein, 19 aa, synthetic construct
  source 1..19: note = Seed: VKDCVVLHSYFTSDYYQLY
VKDCVVLHSIFTHDFYQVY

SEQ ID NO: 101762 - protein, 19 aa, synthetic construct
  source 1..19: note = Seed: VEAEVQIDRLITGRLQSLQ
VEAEIQINRIITYRLQSLQ

SEQ ID NO: 101763 - protein, 19 aa, synthetic construct
  source 1..19: note = Seed: SFRLFARTRSMWSFNPETN
SFRLFARARIMWIFNPETN

SEQ ID NO: 101764 - protein, 19 aa, synthetic construct
  source 1..19: note = Seed: SELVIGAVILRGHLRIAGH
SELLIGAVPLRVHLRIAGH

SEQ ID NO: 101765 - protein, 19 aa, synthetic construct
  source 1..19: note = Seed: GAGAALQIPFAMQMAYRFN
GAGAALQIPFAMHMYYRLN

SEQ ID NO: 101766 - protein, 19 aa, synthetic construct
  source 1..19: note = Seed: GAGAALQIPFAMQMAYRFN
GAGAALQIPFAMTMFYRAN

SEQ ID NO: 101767 - protein, 19 aa, synthetic construct
  source 1..19: note = Seed: VKDCVVLHSYFTSDYYQLY
VKDCVVLHSFFTHDWYQLY

SEQ ID NO: 101768 - protein, 19 aa, synthetic construct
  source 1..19: note = Seed: GAGAALQIPFAMQMAYRFN
GAGAALQIPFAMSMAYRLN

SEQ ID NO: 101769 - protein, 19 aa, synthetic construct
  source 1..19: note = Seed: SELVIGAVILRGHLRIAGH
SELSIGAVALRAHLRIAGH

SEQ ID NO: 101770 - protein, 19 aa, synthetic construct
  source 1..19: note = Seed: SELVIGAVILRGHLRIAGH
SELMIGFVILRMHLRIAGH

SEQ ID NO: 101771 - protein, 19 aa, synthetic construct
  source 1..19: note = Seed: SFRLFARTRSMWSFNPETN
SFRLFARLRAMWAFNPETN

SEQ ID NO: 101772 - protein, 19 aa, synthetic construct
  source 1..19: note = Seed: SELVIGAVILRGHLRIAGH
SELLIGSVALRAHLRIAGH

SEQ ID NO: 101773 - protein, 19 aa, synthetic construct
  source 1..19: note = Seed: SELVIGAVILRGHLRIAGH
SELLIGAVPLRAHLRIAGH

SEQ ID NO: 101774 - protein, 19 aa, synthetic construct
  source 1..19: note = Seed: VEAEVQIDRLITGRLQSLQ
VEAEIQIIRNITARLQSLQ

SEQ ID NO: 101775 - protein, 19 aa, synthetic construct
  source 1..19: note = Seed: SELVIGAVILRGHLRIAGH
SELRIGTVILRMHLRIAGH

SEQ ID NO: 101776 - protein, 19 aa, synthetic construct
  source 1..19: note = Seed: SELVIGAVILRGHLRIAGH
SELFIGAVILRHHLRIAGH

SEQ ID NO: 101777 - protein, 19 aa, synthetic construct
  source 1..19: note = Seed: VEAEVQIDRLITGRLQSLQ
VEAEIQIFRHITMRLQSLQ

SEQ ID NO: 101778 - protein, 19 aa, synthetic construct
  source 1..19: note = Seed: SFRLFARTRSMWSFNPETN
SFRLFARARAMWAFNPETN

SEQ ID NO: 101779 - protein, 19 aa, synthetic construct
  source 1..19: note = Seed: GAGAALQIPFAMQMAYRFN
GAGAALQIPFAMTMAYRIN

SEQ ID NO: 101780 - protein, 19 aa, synthetic construct
  source 1..19: note = Seed: GAGAALQIPFAMQMAYRFN
GAGAALQIPFAMAMFYRMN

SEQ ID NO: 101781 - protein, 19 aa, synthetic construct
  source 1..19: note = Seed: GAGAALQIPFAMQMAYRFN
GAGAALQIPYAMEMFYRIN

SEQ ID NO: 101782 - protein, 19 aa, synthetic construct
  source 1..19: note = Seed: SELVIGAVILRGHLRIAGH
SELMIGFVALRVHLRIAGH

SEQ ID NO: 101783 - protein, 19 aa, synthetic construct
  source 1..19: note = Seed: SFRLFARTRSMWSFNPETN
SFRLFARARSMWAFNPETN

SEQ ID NO: 101784 - protein, 19 aa, synthetic construct
  source 1..19: note = Seed: GAGAALQIPFAMQMAYRFN
GAGAALQIPFAMEMFYRMN

SEQ ID NO: 101785 - protein, 19 aa, synthetic construct
  source 1..19: note = Seed: SELVIGAVILRGHLRIAGH
SELFIGLVMLRHHLRIAGH

SEQ ID NO: 101786 - protein, 19 aa, synthetic construct
  source 1..19: note = Seed: VEAEVQIDRLITGRLQSLQ
VEAEIQIHRAITLRLQSLQ

SEQ ID NO: 101787 - protein, 19 aa, synthetic construct
  source 1..19: note = Seed: SELVIGAVILRGHLRIAGH
SELRIGEVILRLHLRIAGH

SEQ ID NO: 101788 - protein, 19 aa, synthetic construct
  source 1..19: note = Seed: GAGAALQIPFAMQMAYRFN
GAGAALQIPYAMEMFYRVN

SEQ ID NO: 101789 - protein, 19 aa, synthetic construct
  source 1..19: note = Seed: GAGAALQIPFAMQMAYRFN
GAGAALQIPFAMEMFYRTN

SEQ ID NO: 101790 - protein, 19 aa, synthetic construct
  source 1..19: note = Seed: GAGAALQIPFAMQMAYRFN
GAGAALQIPFAMEMYYRVN

SEQ ID NO: 101791 - protein, 19 aa, synthetic construct
  source 1..19: note = Seed: GAGAALQIPFAMQMAYRFN
GAGAALQIPFAMQMFYRFN

SEQ ID NO: 101792 - protein, 19 aa, synthetic construct
  source 1..19: note = Seed: SELVIGAVILRGHLRIAGH
SELMIGAVALRSHLRIAGH

SEQ ID NO: 101793 - protein, 19 aa, synthetic construct
  source 1..19: note = Seed: SFRLFARTRSMWSFNPETN
SFRLFARIRPMWVFNPETN

SEQ ID NO: 101794 - protein, 19 aa, synthetic construct
  source 1..19: note = Seed: SELVIGAVILRGHLRIAGH
SELMIGSVVLRAHLRIAGH

SEQ ID NO: 101795 - protein, 19 aa, synthetic construct
  source 1..19: note = Seed: VEAEVQIDRLITGRLQSLQ
VEAEIQIMRSITLRLQSLQ

SEQ ID NO: 101796 - protein, 19 aa, synthetic construct
  source 1..19: note = Seed: SELVIGAVILRGHLRIAGH
SELVIGIVIMRNHLRIAGH

SEQ ID NO: 101797 - protein, 19 aa, synthetic construct
  source 1..19: note = Seed: SFRLFARTRSMWSFNPETN
SFRLFARMRSMWAFNPETN

SEQ ID NO: 101798 - protein, 19 aa, synthetic construct
  source 1..19: note = Seed: SFRLFARTRSMWSFNPETN
SFRLFARSRAMWLFNPETN

SEQ ID NO: 101799 - protein, 19 aa, synthetic construct
  source 1..19: note = Seed: SFRLFARTRSMWSFNPETN
SFRLFARARAMWLFNPETN

SEQ ID NO: 101800 - protein, 19 aa, synthetic construct
  source 1..19: note = Seed: SFRLFARTRSMWSFNPETN
SFRLFARIRNMWAFNPETN

SEQ ID NO: 101801 - protein, 19 aa, synthetic construct
  source 1..19: note = Seed: SELVIGAVILRGHLRIAGH
SELFIGIVALRVHLRIAGH

SEQ ID NO: 101802 - protein, 19 aa, synthetic construct
  source 1..19: note = Seed: SELVIGAVILRGHLRIAGH
SELFIGTVPLRAHLRIAGH

SEQ ID NO: 101803 - protein, 19 aa, synthetic construct
  source 1..19: note = Seed: GAGAALQIPFAMQMAYRFN
GAGAALQIPFAMTMAYRLN

SEQ ID NO: 101804 - protein, 19 aa, synthetic construct
  source 1..19: note = Seed: SELVIGAVILRGHLRIAGH
SELLIGSVALRVHLRIAGH

SEQ ID NO: 101805 - protein, 19 aa, synthetic construct
  source 1..19: note = Seed: GAGAALQIPFAMQMAYRFN
GAGAALIIPYAAQMAYRFN

SEQ ID NO: 101806 - protein, 19 aa, synthetic construct
  source 1..19: note = Seed: SELVIGAVILRGHLRIAGH
SELFIGSVALRYHLRIAGH

SEQ ID NO: 101807 - protein, 19 aa, synthetic construct
  source 1..19: note = Seed: SELVIGAVILRGHLRIAGH
SELMIGSVALRSHLRIAGH

SEQ ID NO: 101808 - protein, 19 aa, synthetic construct
  source 1..19: note = Seed: GAGAALQIPFAMQMAYRFN
GAGAALQIPFAMTMFYRHN

SEQ ID NO: 101809 - protein, 19 aa, synthetic construct
  source 1..19: note = Seed: SFRLFARTRSMWSFNPETN
SFRLIARMRSMWAFNPETN

SEQ ID NO: 101810 - protein, 19 aa, synthetic construct
  source 1..19: note = Seed: VEAEVQIDRLITGRLQSLQ
VEAEIQIMRVITARLQSLQ

SEQ ID NO: 101811 - protein, 19 aa, synthetic construct
  source 1..19: note = Seed: GAGAALQIPFAMQMAYRFN
GAGAALQIPFAMIMPYRIN

SEQ ID NO: 101812 - protein, 19 aa, synthetic construct
  source 1..19: note = Seed: SELVIGAVILRGHLRIAGH
SELMIGMVSLRAHLRIAGH

SEQ ID NO: 101813 - protein, 19 aa, synthetic construct
  source 1..19: note = Seed: SFRLFARTRSMWSFNPETN
SFRLFARSRAMWAFNPETN

SEQ ID NO: 101814 - protein, 19 aa, synthetic construct
  source 1..19: note = Seed: SELVIGAVILRGHLRIAGH
SELIIGSVPLRSHLRIAGH

SEQ ID NO: 101815 - protein, 19 aa, synthetic construct
  source 1..19: note = Seed: SELVIGAVILRGHLRIAGH
SELMIGGVVLRAHLRIAGH

SEQ ID NO: 101816 - protein, 19 aa, synthetic construct
  source 1..19: note = Seed: SELVIGAVILRGHLRIAGH
SELLIGIVNLRAHLRIAGH

SEQ ID NO: 101817 - protein, 19 aa, synthetic construct
  source 1..19: note = Seed: SFRLFARTRSMWSFNPETN
SFRLFARARSMWVFNPETN

SEQ ID NO: 101818 - protein, 19 aa, synthetic construct
  source 1..19: note = Seed: SELVIGAVILRGHLRIAGH
SELYIGQVILRMHLRIAGH

SEQ ID NO: 101819 - protein, 19 aa, synthetic construct
  source 1..19: note = Seed: SELVIGAVILRGHLRIAGH
SELFIGNVILRLHLRIAGH

SEQ ID NO: 101820 - protein, 19 aa, synthetic construct
  source 1..19: note = Seed: SELVIGAVILRGHLRIAGH
SELMIGGVILRAHLRIAGH

SEQ ID NO: 101821 - protein, 19 aa, synthetic construct
  source 1..19: note = Seed: VEAEVQIDRLITGRLQSLQ
VEAEIQIMRHITMRLQSLQ

SEQ ID NO: 101822 - protein, 19 aa, synthetic construct
  source 1..19: note = Seed: GAGAALQIPFAMQMAYRFN
GAGAALQIPFAMEMFYRNN

SEQ ID NO: 101823 - protein, 19 aa, synthetic construct
  source 1..19: note = Seed: SELVIGAVILRGHLRIAGH
SELIIGSVILRAHLRIAGH

SEQ ID NO: 101824 - protein, 19 aa, synthetic construct
  source 1..19: note = Seed: SELVIGAVILRGHLRIAGH
SELFIGMVLLRNHLRIAGH

SEQ ID NO: 101825 - protein, 19 aa, synthetic construct
  source 1..19: note = Seed: SELVIGAVILRGHLRIAGH
SELFIGAVTLRAHLRIAGH

SEQ ID NO: 101826 - protein, 19 aa, synthetic construct
  source 1..19: note = Seed: VEAEVQIDRLITGRLQSLQ
VEAEIQIVRSITARLQSLQ

SEQ ID NO: 101827 - protein, 19 aa, synthetic construct
  source 1..19: note = Seed: GAGAALQIPFAMQMAYRFN
GAGAALQIPFAMEMYYRLN

SEQ ID NO: 101828 - protein, 19 aa, synthetic construct
  source 1..19: note = Seed: GAGAALQIPFAMQMAYRFN
GAGAALQIPFAMHMLYRVN

SEQ ID NO: 101829 - protein, 19 aa, synthetic construct
  source 1..19: note = Seed: SELVIGAVILRGHLRIAGH
SELMIGAVVLRAHLRIAGH

SEQ ID NO: 101830 - protein, 19 aa, synthetic construct
  source 1..19: note = Seed: GAGAALQIPFAMQMAYRFN
GAGAALQIPFAMIMPYRLN

SEQ ID NO: 101831 - protein, 19 aa, synthetic construct
  source 1..19: note = Seed: SELVIGAVILRGHLRIAGH
SELIIGAVPLRLHLRIAGH

SEQ ID NO: 101832 - protein, 19 aa, synthetic construct
  source 1..19: note = Seed: SFRLFARTRSMWSFNPETN
SFRLYARARTMWAFNPETN

SEQ ID NO: 101833 - protein, 19 aa, synthetic construct
  source 1..19: note = Seed: SELVIGAVILRGHLRIAGH
SELFIGNVMLRMHLRIAGH

SEQ ID NO: 101834 - protein, 19 aa, synthetic construct
  source 1..19: note = Seed: SFRLFARTRSMWSFNPETN
SFRLIARARNMWAFNPETN

SEQ ID NO: 101835 - protein, 19 aa, synthetic construct
  source 1..19: note = Seed: VEAEVQIDRLITGRLQSLQ
VEAEIQIMRHITLRLQSLQ

SEQ ID NO: 101836 - protein, 19 aa, synthetic construct
  source 1..19: note = Seed: GAGAALQIPFAMQMAYRFN
GAGAALQIPYAMNMFYRVN

SEQ ID NO: 101837 - protein, 19 aa, synthetic construct
  source 1..19: note = Seed: SFRLFARTRSMWSFNPETN
SFRLFARIRTMWSFNPETN

SEQ ID NO: 101838 - protein, 19 aa, synthetic construct
  source 1..19: note = Seed: SFRLFARTRSMWSFNPETN
SFRLYARARAMWAFNPETN

SEQ ID NO: 101839 - protein, 19 aa, synthetic construct
  source 1..19: note = Seed: SELVIGAVILRGHLRIAGH
SELLIGYVPLRVHLRIAGH

SEQ ID NO: 101840 - protein, 19 aa, synthetic construct
  source 1..19: note = Seed: SELVIGAVILRGHLRIAGH
SELMIGSVPLRAHLRIAGH

SEQ ID NO: 101841 - protein, 19 aa, synthetic construct
  source 1..19: note = Seed: SELVIGAVILRGHLRIAGH
SELVIGIVIARPHLAIAGH

SEQ ID NO: 101842 - protein, 19 aa, synthetic construct
  source 1..19: note = Seed: SELVIGAVILRGHLRIAGH
SELLIGSVPLRAHLRIAGH

SEQ ID NO: 101843 - protein, 19 aa, synthetic construct
  source 1..19: note = Seed: SELVIGAVILRGHLRIAGH
SELVIGYVDLRAHLRIAGH

SEQ ID NO: 101844 - protein, 19 aa, synthetic construct
  source 1..19: note = Seed: GAGAALQIPFAMQMAYRFN
GAGAALQIPFAMSMLYRVN

SEQ ID NO: 101845 - protein, 19 aa, synthetic construct
  source 1..19: note = Seed: SFRLFARTRSMWSFNPETN
SFRLFARIRPMWLFNPETN

SEQ ID NO: 101846 - protein, 19 aa, synthetic construct
  source 1..19: note = Seed: SELVIGAVILRGHLRIAGH
SELFIGFVTLRDHLRIAGH

SEQ ID NO: 101847 - protein, 19 aa, synthetic construct
  source 1..19: note = Seed: GAGAALQIPFAMQMAYRFN
GAGAALQIPFAMNMYYRIN

SEQ ID NO: 101848 - protein, 19 aa, synthetic construct
  source 1..19: note = Seed: GAGAALQIPFAMQMAYRFN
GAGAALQIPFAMSMIYRVN

SEQ ID NO: 101849 - protein, 19 aa, synthetic construct
  source 1..19: note = Seed: GAGAALQIPFAMQMAYRFN
GAGAALIIPYADQMVYRFN

SEQ ID NO: 101850 - protein, 19 aa, synthetic construct
  source 1..19: note = Seed: SELVIGAVILRGHLRIAGH
SELLIGEVLLREHLRIAGH

SEQ ID NO: 101851 - protein, 19 aa, synthetic construct
  source 1..19: note = Seed: SELVIGAVILRGHLRIAGH
SELFIGAVILRTHLRIAGH

SEQ ID NO: 101852 - protein, 19 aa, synthetic construct
  source 1..19: note = Seed: SELVIGAVILRGHLRIAGH
SELFIGSVVLRHHLRIAGH

SEQ ID NO: 101853 - protein, 19 aa, synthetic construct
  source 1..19: note = Seed: GAGAALQIPFAMQMAYRFN
GAGAALQIPFAMSMIYRIN

SEQ ID NO: 101854 - protein, 19 aa, synthetic construct
  source 1..19: note = Seed: GAGAALQIPFAMQMAYRFN
GAGAALQIPLAMNMFYRLN

SEQ ID NO: 101855 - protein, 19 aa, synthetic construct
  source 1..19: note = Seed: SELVIGAVILRGHLRIAGH
SELVIGFVIFRNHLHIAGH

SEQ ID NO: 101856 - protein, 19 aa, synthetic construct
  source 1..19: note = Seed: SELVIGAVILRGHLRIAGH
SELIIGSVALRMHLRIAGH

SEQ ID NO: 101857 - protein, 19 aa, synthetic construct
  source 1..19: note = Seed: SELVIGAVILRGHLRIAGH
SELFIGAVPLRYHLRIAGH

SEQ ID NO: 101858 - protein, 19 aa, synthetic construct
  source 1..19: note = Seed: VEAEVQIDRLITGRLQSLQ
VEAEIQIIRHITMRLQSLQ

SEQ ID NO: 101859 - protein, 19 aa, synthetic construct
  source 1..19: note = Seed: SFRLFARTRSMWSFNPETN
SFRLFARMRNMWAFNPETN

SEQ ID NO: 101860 - protein, 19 aa, synthetic construct
  source 1..19: note = Seed: GAGAALQIPFAMQMAYRFN
GAGAALQIPFAMNMYYRLN

SEQ ID NO: 101861 - protein, 19 aa, synthetic construct
  source 1..19: note = Seed: GAGAALQIPFAMQMAYRFN
GAGAALIIPAAPQMAYRFN

SEQ ID NO: 101862 - protein, 19 aa, synthetic construct
  source 1..19: note = Seed: SELVIGAVILRGHLRIAGH
SELIIGSVILRSHLRIAGH

SEQ ID NO: 101863 - protein, 19 aa, synthetic construct
  source 1..19: note = Seed: SELVIGAVILRGHLRIAGH
SELFIGFVALRRHLRIAGH

SEQ ID NO: 101864 - protein, 19 aa, synthetic construct
  source 1..19: note = Seed: SELVIGAVILRGHLRIAGH
SELMIGAVVLRSHLRIAGH

SEQ ID NO: 101865 - protein, 19 aa, synthetic construct
  source 1..19: note = Seed: VEAEVQIDRLITGRLQSLQ
VEAEIQIFRNITARLQSLQ

SEQ ID NO: 101866 - protein, 19 aa, synthetic construct
  source 1..19: note = Seed: SELVIGAVILRGHLRIAGH
SELIIGTVPLRVHLRIAGH

SEQ ID NO: 101867 - protein, 19 aa, synthetic construct
  source 1..19: note = Seed: SELVIGAVILRGHLRIAGH
SELIIGSVILRNHLRIAGH

SEQ ID NO: 101868 - protein, 19 aa, synthetic construct
  source 1..19: note = Seed: SELVIGAVILRGHLRIAGH
SELLIGAVALRSHLRIAGH

SEQ ID NO: 101869 - protein, 19 aa, synthetic construct
  source 1..19: note = Seed: GAGAALQIPFAMQMAYRFN
GAGAALNIPAAMQMAYRFN

SEQ ID NO: 101870 - protein, 19 aa, synthetic construct
  source 1..19: note = Seed: VEAEVQIDRLITGRLQSLQ
VEAEVQIIRNITYRLQSLQ

SEQ ID NO: 101871 - protein, 19 aa, synthetic construct
  source 1..19: note = Seed: GAGAALQIPFAMQMAYRFN
GAGAALQIPFAMDMFYRFN

SEQ ID NO: 101872 - protein, 19 aa, synthetic construct
  source 1..19: note = Seed: GAGAALQIPFAMQMAYRFN
GAGAALQIPFAMHMAYRLN

SEQ ID NO: 101873 - protein, 19 aa, synthetic construct
  source 1..19: note = Seed: SFRLFARTRSMWSFNPETN
SFRLFARARNMWVFNPETN

SEQ ID NO: 101874 - protein, 19 aa, synthetic construct
  source 1..19: note = Seed: SELVIGAVILRGHLRIAGH
SELNIGGVALRSHLRIAGH

SEQ ID NO: 101875 - protein, 19 aa, synthetic construct
  source 1..19: note = Seed: SELVIGAVILRGHLRIAGH
SELFIGSVTLRVHLRIAGH

SEQ ID NO: 101876 - protein, 19 aa, synthetic construct
  source 1..19: note = Seed: GAGAALQIPFAMQMAYRFN
GAGAALQIPFAMNMLYRVN

SEQ ID NO: 101877 - protein, 19 aa, synthetic construct
  source 1..19: note = Seed: GAGAALQIPFAMQMAYRFN
GAGAALQIPFAMAMAYRIN

SEQ ID NO: 101878 - protein, 19 aa, synthetic construct
  source 1..19: note = Seed: GAGAALQIPFAMQMAYRFN
GAGAALQIPFAMTMPYRIN

SEQ ID NO: 101879 - protein, 19 aa, synthetic construct
  source 1..19: note = Seed: SELVIGAVILRGHLRIAGH
SELVIGSVILRAHLRIAGH

SEQ ID NO: 101880 - protein, 19 aa, synthetic construct
  source 1..19: note = Seed: SFRLFARTRSMWSFNPETN
SFRLFARSRAMWFFNPETN

SEQ ID NO: 101881 - protein, 19 aa, synthetic construct
  source 1..19: note = Seed: SELVIGAVILRGHLRIAGH
SELFIGAVALRDHLRIAGH

SEQ ID NO: 101882 - protein, 19 aa, synthetic construct
  source 1..19: note = Seed: SFRLFARTRSMWSFNPETN
SFRLFARSRSMWAFNPETN

SEQ ID NO: 101883 - protein, 19 aa, synthetic construct
  source 1..19: note = Seed: GAGAALQIPFAMQMAYRFN
GAGAALQIPFAMSMMYRVN

SEQ ID NO: 101884 - protein, 19 aa, synthetic construct
  source 1..19: note = Seed: SELVIGAVILRGHLRIAGH
SELFIGAVVLRDHLRIAGH

SEQ ID NO: 101885 - protein, 19 aa, synthetic construct
  source 1..19: note = Seed: SELVIGAVILRGHLRIAGH
SELFIGAVALREHLRIAGH

SEQ ID NO: 101886 - protein, 19 aa, synthetic construct
  source 1..19: note = Seed: GAGAALQIPFAMQMAYRFN
GAGAALQIPFAMEMFYREN

SEQ ID NO: 101887 - protein, 19 aa, synthetic construct
  source 1..19: note = Seed: GAGAALQIPFAMQMAYRFN
GAGAALQIPWAMEMFYRLN

SEQ ID NO: 101888 - protein, 19 aa, synthetic construct
  source 1..19: note = Seed: SFRLFARTRSMWSFNPETN
SFRLFARHRAMWIFNPETN

SEQ ID NO: 101889 - protein, 19 aa, synthetic construct
  source 1..19: note = Seed: GAGAALQIPFAMQMAYRFN
GAGAARQIAFAMQNAYRFN

SEQ ID NO: 101890 - protein, 19 aa, synthetic construct
  source 1..19: note = Seed: GAGAALQIPFAMQMAYRFN
GAGAALQIPFAMNMIYRIN

SEQ ID NO: 101891 - protein, 19 aa, synthetic construct
  source 1..19: note = Seed: SFRLFARTRSMWSFNPETN
SFRLFARARPMWAFNPETN

SEQ ID NO: 101892 - protein, 19 aa, synthetic construct
  source 1..19: note = Seed: GAGAALQIPFAMQMAYRFN
GAGAALQIPFAMHMFYRHN

SEQ ID NO: 101893 - protein, 19 aa, synthetic construct
  source 1..19: note = Seed: SELVIGAVILRGHLRIAGH
SELLIGEVILREHLRIAGH

SEQ ID NO: 101894 - protein, 19 aa, synthetic construct
  source 1..19: note = Seed: SFRLFARTRSMWSFNPETN
SFRLFARSRVMWIFNPETN

SEQ ID NO: 101895 - protein, 19 aa, synthetic construct
  source 1..19: note = Seed: SFRLFARTRSMWSFNPETN
SFRLIARNRAMWVFNPETN

SEQ ID NO: 101896 - protein, 19 aa, synthetic construct
  source 1..19: note = Seed: SFRLFARTRSMWSFNPETN
SFRLFARSRTMWAFNPETN

SEQ ID NO: 101897 - protein, 19 aa, synthetic construct
  source 1..19: note = Seed: GAGAALQIPFAMQMAYRFN
GAGAALQIPFAMSMIYRLN

SEQ ID NO: 101898 - protein, 19 aa, synthetic construct
  source 1..19: note = Seed: SELVIGAVILRGHLRIAGH
SELFIGAVILREHLRIAGH

SEQ ID NO: 101899 - protein, 19 aa, synthetic construct
  source 1..19: note = Seed: GAGAALQIPFAMQMAYRFN
GAGAALQIPFAMLMPYRIN

SEQ ID NO: 101900 - protein, 19 aa, synthetic construct
  source 1..19: note = Seed: SELVIGAVILRGHLRIAGH
SELVIGAVALRSHLRIAGH

SEQ ID NO: 101901 - protein, 19 aa, synthetic construct
  source 1..19: note = Seed: SELVIGAVILRGHLRIAGH
SELIIGNVILRIHLRIAGH

SEQ ID NO: 101902 - protein, 19 aa, synthetic construct
  source 1..19: note = Seed: SFRLFARTRSMWSFNPETN
SFRLFARTRAMWLFNPETN

SEQ ID NO: 101903 - protein, 19 aa, synthetic construct
  source 1..19: note = Seed: SFRLFARTRSMWSFNPETN
SFRLFARHRAMWVFNPETN

SEQ ID NO: 101904 - protein, 19 aa, synthetic construct
  source 1..19: note = Seed: GAGAALQIPFAMQMAYRFN
GAGAALQIPIAMNMFYRVN

SEQ ID NO: 101905 - protein, 19 aa, synthetic construct
  source 1..19: note = Seed: GAGAALQIPFAMQMAYRFN
GAGAALQIPFAMVMPYRLN

SEQ ID NO: 101906 - protein, 19 aa, synthetic construct
  source 1..19: note = Seed: SELVIGAVILRGHLRIAGH
SELYIGSVILRNHLRIAGH

SEQ ID NO: 101907 - protein, 19 aa, synthetic construct
  source 1..19: note = Seed: VEAEVQIDRLITGRLQSLQ
VEAEIQIYRIITHRLQSLQ

SEQ ID NO: 101908 - protein, 19 aa, synthetic construct
  source 1..19: note = Seed: GAGAALQIPFAMQMAYRFN
GAGAALQIPFAMLMPYRVN

SEQ ID NO: 101909 - protein, 19 aa, synthetic construct
  source 1..19: note = Seed: VEAEVQIDRLITGRLQSLQ
VEAEFQIIRNITYRLQSLQ

SEQ ID NO: 101910 - protein, 19 aa, synthetic construct
  source 1..19: note = Seed: SELVIGAVILRGHLRIAGH
SELLIGLVPLRIHLRIAGH

SEQ ID NO: 101911 - protein, 19 aa, synthetic construct
  source 1..19: note = Seed: GAGAALQIPFAMQMAYRFN
GAGAALQIPFAMHMLYRFN

SEQ ID NO: 101912 - protein, 19 aa, synthetic construct
  source 1..19: note = Seed: GAGAALQIPFAMQMAYRFN
GAGAALQIPFAMNMAYRLN

SEQ ID NO: 101913 - protein, 19 aa, synthetic construct
  source 1..19: note = Seed: SFRLFARTRSMWSFNPETN
SFRLFARMRNMWSFNPETN

SEQ ID NO: 101914 - protein, 19 aa, synthetic construct
  source 1..19: note = Seed: GAGAALQIPFAMQMAYRFN
GAGAALQIPFAMMMPYRIN

SEQ ID NO: 101915 - protein, 19 aa, synthetic construct
  source 1..19: note = Seed: GAGAALQIPFAMQMAYRFN
GAGAALQIPFAMAMFYRRN

SEQ ID NO: 101916 - protein, 19 aa, synthetic construct
  source 1..19: note = Seed: SELVIGAVILRGHLRIAGH
SELFIGTVALRTHLRIAGH

SEQ ID NO: 101917 - protein, 19 aa, synthetic construct
  source 1..19: note = Seed: SELVIGAVILRGHLRIAGH
SELNIGMVVLRAHLRIAGH

SEQ ID NO: 101918 - protein, 19 aa, synthetic construct
  source 1..19: note = Seed: GAGAALQIPFAMQMAYRFN
GAGAALQIPYAMDMFYRIN

SEQ ID NO: 101919 - protein, 19 aa, synthetic construct
  source 1..19: note = Seed: SFRLFARTRSMWSFNPETN
SFRLFARIRTMWNFNPETN

SEQ ID NO: 101920 - protein, 19 aa, synthetic construct
  source 1..19: note = Seed: SELVIGAVILRGHLRIAGH
SELIIGAVTLRAHLRIAGH

SEQ ID NO: 101921 - protein, 19 aa, synthetic construct
  source 1..19: note = Seed: GAGAALQIPFAMQMAYRFN
GAGAALQIPFAMLMPYRLN

SEQ ID NO: 101922 - protein, 19 aa, synthetic construct
  source 1..19: note = Seed: SELVIGAVILRGHLRIAGH
SELIIGAVVLRAHLRIAGH

SEQ ID NO: 101923 - protein, 19 aa, synthetic construct
  source 1..19: note = Seed: GAGAALQIPFAMQMAYRFN
GAGAALQIPFAMSMVYRVN

SEQ ID NO: 101924 - protein, 19 aa, synthetic construct
  source 1..19: note = Seed: GAGAALQIPFAMQMAYRFN
GAGAALQIPFAMSMVYRIN

SEQ ID NO: 101925 - protein, 19 aa, synthetic construct
  source 1..19: note = Seed: SFRLFARTRSMWSFNPETN
SFRLYARNRAMWIFNPETN

SEQ ID NO: 101926 - protein, 19 aa, synthetic construct
  source 1..19: note = Seed: GAGAALQIPFAMQMAYRFN
GAGAALQIPFAMNMIYRLN

SEQ ID NO: 101927 - protein, 19 aa, synthetic construct
  source 1..19: note = Seed: SFRLFARTRSMWSFNPETN
SFRLFARLRNMWSFNPETN

SEQ ID NO: 101928 - protein, 19 aa, synthetic construct
  source 1..19: note = Seed: GAGAALQIPFAMQMAYRFN
GAGAALQIPFAMMMPYRLN

SEQ ID NO: 101929 - protein, 19 aa, synthetic construct
  source 1..19: note = Seed: GAGAALQIPFAMQMAYRFN
GAGAALQIPFAMFMPYRVN

SEQ ID NO: 101930 - protein, 19 aa, synthetic construct
  source 1..19: note = Seed: GAGAALQIPFAMQMAYRFN
GAGAALQIPFAMMMPYRVN

SEQ ID NO: 101931 - protein, 19 aa, synthetic construct
  source 1..19: note = Seed: SELVIGAVILRGHLRIAGH
SELMIGAVTLRAHLRIAGH

SEQ ID NO: 101932 - protein, 19 aa, synthetic construct
  source 1..19: note = Seed: SFRLFARTRSMWSFNPETN
SFRLFARMRHMWAFNPETN

SEQ ID NO: 101933 - protein, 19 aa, synthetic construct
  source 1..19: note = Seed: GAGAALQIPFAMQMAYRFN
GAGAALQIPFAMHMVYRIN

SEQ ID NO: 101934 - protein, 19 aa, synthetic construct
  source 1..19: note = Seed: SELVIGAVILRGHLRIAGH
SELFIGQVVLRMHLRIAGH

SEQ ID NO: 101935 - protein, 19 aa, synthetic construct
  source 1..19: note = Seed: SFRLFARTRSMWSFNPETN
SFRLIARTRAMWIFNPETN

SEQ ID NO: 101936 - protein, 19 aa, synthetic construct
  source 1..19: note = Seed: GAGAALQIPFAMQMAYRFN
GAGAALQIPFAMTMLYRLN

SEQ ID NO: 101937 - protein, 19 aa, synthetic construct
  source 1..19: note = Seed: SELVIGAVILRGHLRIAGH
SELVIGSVILRSHLRIAGH

SEQ ID NO: 101938 - protein, 19 aa, synthetic construct
  source 1..19: note = Seed: SELVIGAVILRGHLRIAGH
SELFIGSVMLRRHLRIAGH

SEQ ID NO: 101939 - protein, 19 aa, synthetic construct
  source 1..19: note = Seed: SELVIGAVILRGHLRIAGH
SELMIGSVLLRAHLRIAGH

SEQ ID NO: 101940 - protein, 19 aa, synthetic construct
  source 1..19: note = Seed: GAGAALQIPFAMQMAYRFN
GAGAALQIPYAMDMFYRLN

SEQ ID NO: 101941 - protein, 19 aa, synthetic construct
  source 1..19: note = Seed: SELVIGAVILRGHLRIAGH
SELFIGFVVLRHHLRIAGH

SEQ ID NO: 101942 - protein, 19 aa, synthetic construct
  source 1..19: note = Seed: GAGAALQIPFAMQMAYRFN
GAGAALQIPFAMFMPYRLN

SEQ ID NO: 101943 - protein, 19 aa, synthetic construct
  source 1..19: note = Seed: SELVIGAVILRGHLRIAGH
SELFIGTVALRNHLRIAGH

SEQ ID NO: 101944 - protein, 19 aa, synthetic construct
  source 1..19: note = Seed: GAGAALQIPFAMQMAYRFN
GAGAALQIPFAMHMVYRLN

SEQ ID NO: 101945 - protein, 19 aa, synthetic construct
  source 1..19: note = Seed: GAGAALQIPFAMQMAYRFN
GAGAALQIPFAMTMAYRFN

SEQ ID NO: 101946 - protein, 19 aa, synthetic construct
  source 1..19: note = Seed: SELVIGAVILRGHLRIAGH
SELFIGQVILRDHLRIAGH

SEQ ID NO: 101947 - protein, 19 aa, synthetic construct
  source 1..19: note = Seed: GAGAALQIPFAMQMAYRFN
GAGAALQIPFAMSMSYRVN

SEQ ID NO: 101948 - protein, 19 aa, synthetic construct
  source 1..19: note = Seed: VEAEVQIDRLITGRLQSLQ
VEAEIQIIRHITARLQSLQ

SEQ ID NO: 101949 - protein, 19 aa, synthetic construct
  source 1..19: note = Seed: SELVIGAVILRGHLRIAGH
SELFIGEVMLRHHLRIAGH

SEQ ID NO: 101950 - protein, 19 aa, synthetic construct
  source 1..19: note = Seed: GAGAALQIPFAMQMAYRFN
GAGAALQIPFAMNMFYREN

SEQ ID NO: 101951 - protein, 19 aa, synthetic construct
  source 1..19: note = Seed: GAGAALQIPFAMQMAYRFN
GAGAALQIPFAMTMSYRIN

SEQ ID NO: 101952 - protein, 19 aa, synthetic construct
  source 1..19: note = Seed: GAGAALQIPFAMQMAYRFN
GAGAALQIPFAMIMAYRVN

SEQ ID NO: 101953 - protein, 19 aa, synthetic construct
  source 1..19: note = Seed: SELVIGAVILRGHLRIAGH
SELFIGSVVLRDHLRIAGH

SEQ ID NO: 101954 - protein, 19 aa, synthetic construct
  source 1..19: note = Seed: SELVIGAVILRGHLRIAGH
SELMIGSVPLRSHLRIAGH

SEQ ID NO: 101955 - protein, 19 aa, synthetic construct
  source 1..19: note = Seed: GAGAALQIPFAMQMAYRFN
GAGAALQIPFAMSMVYRLN

SEQ ID NO: 101956 - protein, 19 aa, synthetic construct
  source 1..19: note = Seed: SELVIGAVILRGHLRIAGH
SELFIGSVALREHLRIAGH

SEQ ID NO: 101957 - protein, 19 aa, synthetic construct
  source 1..19: note = Seed: SELVIGAVILRGHLRIAGH
SELRIGSVILRVHLRIAGH

SEQ ID NO: 101958 - protein, 19 aa, synthetic construct
  source 1..19: note = Seed: SFRLFARTRSMWSFNPETN
SFRLFARARAMWRFNPETN

SEQ ID NO: 101959 - protein, 19 aa, synthetic construct
  source 1..19: note = Seed: SELVIGAVILRGHLRIAGH
SELIIGSVTLRAHLRIAGH

SEQ ID NO: 101960 - protein, 19 aa, synthetic construct
  source 1..19: note = Seed: VEAEVQIDRLITGRLQSLQ
VEAEIQIMRAITARLQSLQ

SEQ ID NO: 101961 - protein, 19 aa, synthetic construct
  source 1..19: note = Seed: SFRLFARTRSMWSFNPETN
SFRLFARTRAMWFFNPETN

SEQ ID NO: 101962 - protein, 19 aa, synthetic construct
  source 1..19: note = Seed: GAGAALQIPFAMQMAYRFN
GAGAALQIPFAMDMFYRYN

SEQ ID NO: 101963 - protein, 19 aa, synthetic construct
  source 1..19: note = Seed: SELVIGAVILRGHLRIAGH
SELLIGNVLLRVHLRIAGH

SEQ ID NO: 101964 - protein, 19 aa, synthetic construct
  source 1..19: note = Seed: SELVIGAVILRGHLRIAGH
SELFIGAVLLRAHLRIAGH

SEQ ID NO: 101965 - protein, 19 aa, synthetic construct
  source 1..19: note = Seed: SELVIGAVILRGHLRIAGH
SELMIGAVSLRAHLRIAGH

SEQ ID NO: 101966 - protein, 19 aa, synthetic construct
  source 1..19: note = Seed: GAGAALQIPFAMQMAYRFN
GAGAALQIPFAMNMIYRFN

SEQ ID NO: 101967 - protein, 19 aa, synthetic construct
  source 1..19: note = Seed: GAGAALQIPFAMQMAYRFN
GAGAALQIPIAMEMFYRLN

SEQ ID NO: 101968 - protein, 19 aa, synthetic construct
  source 1..19: note = Seed: GAGAALQIPFAMQMAYRFN
GAGAALQIPFAMVMAYRVN

SEQ ID NO: 101969 - protein, 19 aa, synthetic construct
  source 1..19: note = Seed: GAGAALQIPFAMQMAYRFN
GAGAALQIPFAMQMAYRLN

SEQ ID NO: 101970 - protein, 19 aa, synthetic construct
  source 1..19: note = Seed: GAGAALQIPFAMQMAYRFN
GAGAALQIPFAMSMLYRMN

SEQ ID NO: 101971 - protein, 19 aa, synthetic construct
  source 1..19: note = Seed: GAGAALQIPFAMQMAYRFN
GAGAALQIPFAMSMIYRYN

SEQ ID NO: 101972 - protein, 19 aa, synthetic construct
  source 1..19: note = Seed: GAGAALQIPFAMQMAYRFN
GAGAALQIPFAMMMAYRVN

SEQ ID NO: 101973 - protein, 19 aa, synthetic construct
  source 1..19: note = Seed: GAGAALQIPFAMQMAYRFN
GAGAALQIPFAMSMLYRNN

SEQ ID NO: 101974 - protein, 19 aa, synthetic construct
  source 1..19: note = Seed: GAGAALQIPFAMQMAYRFN
GAGAALQIPFAMIMAYRLN

SEQ ID NO: 101975 - protein, 19 aa, synthetic construct
  source 1..19: note = Seed: GAGAALQIPFAMQMAYRFN
GAGAALQIPFAMNMAYRFN

SEQ ID NO: 101976 - protein, 19 aa, synthetic construct
  source 1..19: note = Seed: SFRLFARTRSMWSFNPETN
SFRLFARARTMWGFNPETN

SEQ ID NO: 101977 - protein, 19 aa, synthetic construct
  source 1..19: note = Seed: GAGAALQIPFAMQMAYRFN
GAGAALQIPFAMQMAYRVN

SEQ ID NO: 101978 - protein, 19 aa, synthetic construct
  source 1..19: note = Seed: SELVIGAVILRGHLRIAGH
SELFIGAVVLRIHLRIAGH

SEQ ID NO: 101979 - protein, 19 aa, synthetic construct
  source 1..19: note = Seed: SELVIGAVILRGHLRIAGH
SELNIGGVTLRAHLRIAGH

SEQ ID NO: 101980 - protein, 19 aa, synthetic construct
  source 1..19: note = Seed: GAGAALQIPFAMQMAYRFN
GAGAALQIPFAMEMWYRLN

SEQ ID NO: 101981 - protein, 19 aa, synthetic construct
  source 1..19: note = Seed: GAGAALQIPFAMQMAYRFN
GAGAALQIPFAMIMPYRMN

SEQ ID NO: 101982 - protein, 19 aa, synthetic construct
  source 1..19: note = Seed: GAGAALQIPFAMQMAYRFN
GAGAALQIPFAMMMAYRIN

SEQ ID NO: 101983 - protein, 19 aa, synthetic construct
  source 1..19: note = Seed: GAGAALQIPFAMQMAYRFN
GAGAALQIPFAMEMAYRIN

SEQ ID NO: 101984 - protein, 19 aa, synthetic construct
  source 1..19: note = Seed: GAGAALQIPFAMQMAYRFN
GAGAALQIPFAMSMLYRTN

SEQ ID NO: 101985 - protein, 19 aa, synthetic construct
  source 1..19: note = Seed: SFRLFARTRSMWSFNPETN
SFRLYARSRSMWLFNPETN

SEQ ID NO: 101986 - protein, 19 aa, synthetic construct
  source 1..19: note = Seed: GAGAALQIPFAMQMAYRFN
GAGAALQIPFAMVMAYRIN

SEQ ID NO: 101987 - protein, 19 aa, synthetic construct
  source 1..19: note = Seed: SELVIGAVILRGHLRIAGH
SELFIGQVILREHLRIAGH

SEQ ID NO: 101988 - protein, 19 aa, synthetic construct
  source 1..19: note = Seed: GAGAALQIPFAMQMAYRFN
GAGAALQIPFAMTMVYRLN

SEQ ID NO: 101989 - protein, 19 aa, synthetic construct
  source 1..19: note = Seed: GAGAALQIPFAMQMAYRFN
GAGAALQIPFAMTMVYRIN

SEQ ID NO: 101990 - protein, 19 aa, synthetic construct
  source 1..19: note = Seed: SELVIGAVILRGHLRIAGH
SELFIGIVPLRVHLRIAGH

SEQ ID NO: 101991 - protein, 19 aa, synthetic construct
  source 1..19: note = Seed: SFRLFARTRSMWSFNPETN
SFRLFARTRSMWAFNPETN

SEQ ID NO: 101992 - protein, 19 aa, synthetic construct
  source 1..19: note = Seed: SELVIGAVILRGHLRIAGH
SELMIGAVTLRSHLRIAGH

SEQ ID NO: 101993 - protein, 19 aa, synthetic construct
  source 1..19: note = Seed: GAGAALQIPFAMQMAYRFN
GAGAALQIPFAMEMAYRLN

SEQ ID NO: 101994 - protein, 19 aa, synthetic construct
  source 1..19: note = Seed: SELVIGAVILRGHLRIAGH
SELMIGAVMLRAHLRIAGH

SEQ ID NO: 101995 - protein, 19 aa, synthetic construct
  source 1..19: note = Seed: SELVIGAVILRGHLRIAGH
SELFIGFVPLRVHLRIAGH

SEQ ID NO: 101996 - protein, 19 aa, synthetic construct
  source 1..19: note = Seed: GAGAALQIPFAMQMAYRFN
GAGAALQIPFAMDMFYRNN

SEQ ID NO: 101997 - protein, 19 aa, synthetic construct
  source 1..19: note = Seed: GAGAALQIPFAMQMAYRFN
GAGAALQIPFAMTMAYRYN

SEQ ID NO: 101998 - protein, 19 aa, synthetic construct
  source 1..19: note = Seed: GAGAALQIPFAMQMAYRFN
GAGAALQIPFAMLMAYRVN

SEQ ID NO: 101999 - protein, 19 aa, synthetic construct
  source 1..19: note = Seed: SELVIGAVILRGHLRIAGH
SELRIGSVILRIHLRIAGH

SEQ ID NO: 102000 - protein, 19 aa, synthetic construct
  source 1..19: note = Seed: SELVIGAVILRGHLRIAGH
SELFIGSVTLRMHLRIAGH

SEQ ID NO: 102001 - protein, 19 aa, synthetic construct
  source 1..19: note = Seed: GAGAALQIPFAMQMAYRFN
GAGAALQIPYAMEMFYRYN

SEQ ID NO: 102002 - protein, 19 aa, synthetic construct
  source 1..19: note = Seed: GAGAALQIPFAMQMAYRFN
GAGAALQIPFAMVMAYRLN

SEQ ID NO: 102003 - protein, 19 aa, synthetic construct
  source 1..19: note = Seed: GAGAALQIPFAMQMAYRFN
GAGAALQIPFAMAMIYRVN

SEQ ID NO: 102004 - protein, 19 aa, synthetic construct
  source 1..19: note = Seed: GAGAALQIPFAMQMAYRFN
GAGAALQIPFAMFMPYRMN

SEQ ID NO: 102005 - protein, 19 aa, synthetic construct
  source 1..19: note = Seed: SELVIGAVILRGHLRIAGH
SELFIGSVSLRMHLRIAGH

SEQ ID NO: 102006 - protein, 19 aa, synthetic construct
  source 1..19: note = Seed: SELVIGAVILRGHLRIAGH
SELIIGAVALRGHLRIAGH

SEQ ID NO: 102007 - protein, 19 aa, synthetic construct
  source 1..19: note = Seed: GAGAALQIPFAMQMAYRFN
GAGAALQIPFAMIMSYRVN

SEQ ID NO: 102008 - protein, 19 aa, synthetic construct
  source 1..19: note = Seed: SFRLFARTRSMWSFNPETN
SFRLFARARAMWDFNPETN

SEQ ID NO: 102009 - protein, 19 aa, synthetic construct
  source 1..19: note = Seed: GAGAALQIPFAMQMAYRFN
GAGAALQIPFAMIMAYRYN

SEQ ID NO: 102010 - protein, 19 aa, synthetic construct
  source 1..19: note = Seed: GAGAALQIPFAMQMAYRFN
GAGAALQIPFAMFMAYRRN

SEQ ID NO: 102011 - protein, 19 aa, synthetic construct
  source 1..19: note = Seed: GAGAALQIPFAMQMAYRFN
GAGAALQIPIAMSMAYRIN

SEQ ID NO: 102012 - protein, 19 aa, synthetic construct
  source 1..19: note = Seed: GAGAALQIPFAMQMAYRFN
GAGAALQIPFAMMMSYRVN

SEQ ID NO: 102013 - protein, 19 aa, synthetic construct
  source 1..19: note = Seed: VEAEVQIDRLITGRLQSLQ
VEAELQIMRNITSRLQSLQ

SEQ ID NO: 102014 - protein, 19 aa, synthetic construct
  source 1..19: note = Seed: SELVIGAVILRGHLRIAGH
SELCIGTVLLRVHLRIAGH

SEQ ID NO: 102015 - protein, 19 aa, synthetic construct
  source 1..19: note = Seed: GAGAALQIPFAMQMAYRFN
GAGAALQIPFAMDMFYRSN

SEQ ID NO: 102016 - protein, 19 aa, synthetic construct
  source 1..19: note = Seed: SELVIGAVILRGHLRIAGH
SELYIGSVMLRTHLRIAGH

SEQ ID NO: 102017 - protein, 19 aa, synthetic construct
  source 1..19: note = Seed: GAGAALQIPFAMQMAYRFN
GAGAALQIPFAMTMPYRFN

SEQ ID NO: 102018 - protein, 19 aa, synthetic construct
  source 1..19: note = Seed: GAGAALQIPFAMQMAYRFN
GAGAALQIPFAMFMAYRVN

SEQ ID NO: 102019 - protein, 19 aa, synthetic construct
  source 1..19: note = Seed: GAGAALQIPFAMQMAYRFN
GAGAALQIPFAMAMIYRIN

SEQ ID NO: 102020 - protein, 19 aa, synthetic construct
  source 1..19: note = Seed: SELVIGAVILRGHLRIAGH
SELFIGSVQLRVHLRIAGH

SEQ ID NO: 102021 - protein, 19 aa, synthetic construct
  source 1..19: note = Seed: SELVIGAVILRGHLRIAGH
SELFIGNVALRVHLRIAGH

SEQ ID NO: 102022 - protein, 19 aa, synthetic construct
  source 1..19: note = Seed: SELVIGAVILRGHLRIAGH
SELFIGEVALRAHLRIAGH

SEQ ID NO: 102023 - protein, 19 aa, synthetic construct
  source 1..19: note = Seed: GAGAALQIPFAMQMAYRFN
GAGAALQIPFAMEMIYRIN

SEQ ID NO: 102024 - protein, 19 aa, synthetic construct
  source 1..19: note = Seed: GAGAALQIPFAMQMAYRFN
GAGAALQIPFAMHMSYRLN

SEQ ID NO: 102025 - protein, 19 aa, synthetic construct
  source 1..19: note = Seed: GAGAALQIPFAMQMAYRFN
GAGAALQIPFAMDMYYRLN

SEQ ID NO: 102026 - protein, 19 aa, synthetic construct
  source 1..19: note = Seed: SFRLFARTRSMWSFNPETN
SFRLYARSRTMWAFNPETN

SEQ ID NO: 102027 - protein, 19 aa, synthetic construct
  source 1..19: note = Seed: GAGAALQIPFAMQMAYRFN
GAGAALQIPWAMTMYYRVN

SEQ ID NO: 102028 - protein, 19 aa, synthetic construct
  source 1..19: note = Seed: GAGAALQIPFAMQMAYRFN
GAGAALQIPFAMSMIYRNN

SEQ ID NO: 102029 - protein, 19 aa, synthetic construct
  source 1..19: note = Seed: GAGAALQIPFAMQMAYRFN
GAGAALQIPFAMLMPYRMN

SEQ ID NO: 102030 - protein, 19 aa, synthetic construct
  source 1..19: note = Seed: SELVIGAVILRGHLRIAGH
SELLIGTVILRDHLRIAGH

SEQ ID NO: 102031 - protein, 19 aa, synthetic construct
  source 1..19: note = Seed: SELVIGAVILRGHLRIAGH
SELYIGAVILREHLRIAGH

SEQ ID NO: 102032 - protein, 19 aa, synthetic construct
  source 1..19: note = Seed: GAGAALQIPFAMQMAYRFN
GAGAALQIPFAMMMNYRVN

SEQ ID NO: 102033 - protein, 19 aa, synthetic construct
  source 1..19: note = Seed: GAGAALQIPFAMQMAYRFN
GAGAALQIPFAMSMVYRFN

SEQ ID NO: 102034 - protein, 19 aa, synthetic construct
  source 1..19: note = Seed: GAGAALQIPFAMQMAYRFN
GAGAALQIPFAMQMIYRVN

SEQ ID NO: 102035 - protein, 19 aa, synthetic construct
  source 1..19: note = Seed: GAGAALQIPFAMQMAYRFN
GAGAALQIPYAMSMAYRIN

SEQ ID NO: 102036 - protein, 19 aa, synthetic construct
  source 1..19: note = Seed: SELVIGAVILRGHLRIAGH
SELFIGFVPLRAHLRIAGH

SEQ ID NO: 102037 - protein, 19 aa, synthetic construct
  source 1..19: note = Seed: SELVIGAVILRGHLRIAGH
SELFIGDVFLRHHLRIAGH

SEQ ID NO: 102038 - protein, 19 aa, synthetic construct
  source 1..19: note = Seed: SELVIGAVILRGHLRIAGH
SELFIGFVPLRIHLRIAGH

SEQ ID NO: 102039 - protein, 19 aa, synthetic construct
  source 1..19: note = Seed: GAGAALQIPFAMQMAYRFN
GAGAALQIPFAMIMNYRVN

SEQ ID NO: 102040 - protein, 19 aa, synthetic construct
  source 1..19: note = Seed: SELVIGAVILRGHLRIAGH
SELIIGFVNLRDHLRIAGH

SEQ ID NO: 102041 - protein, 19 aa, synthetic construct
  source 1..19: note = Seed: GAGAALQIPFAMQMAYRFN
GAGAALQIPFAMMMSYRIN

SEQ ID NO: 102042 - protein, 19 aa, synthetic construct
  source 1..19: note = Seed: GAGAALQIPFAMQMAYRFN
GAGAALQIPFAMTMLYRRN

SEQ ID NO: 102043 - protein, 19 aa, synthetic construct
  source 1..19: note = Seed: GAGAALQIPFAMQMAYRFN
GAGAALQIPYAMIMPYRLN

SEQ ID NO: 102044 - protein, 19 aa, synthetic construct
  source 1..19: note = Seed: SELVIGAVILRGHLRIAGH
SELFIGNVALRIHLRIAGH

SEQ ID NO: 102045 - protein, 19 aa, synthetic construct
  source 1..19: note = Seed: GAGAALQIPFAMQMAYRFN
GAGAALQIPYAMSMIYRVN

SEQ ID NO: 102046 - protein, 19 aa, synthetic construct
  source 1..19: note = Seed: GAGAALQIPFAMQMAYRFN
GAGAALQIPFAMVMPYRMN

SEQ ID NO: 102047 - protein, 19 aa, synthetic construct
  source 1..19: note = Seed: GAGAALQIPFAMQMAYRFN
GAGAALQIPFAMTMNYRIN

SEQ ID NO: 102048 - protein, 19 aa, synthetic construct
  source 1..19: note = Seed: GAGAALQIPFAMQMAYRFN
GAGAALQIPFAMYMAYRVN

SEQ ID NO: 102049 - protein, 19 aa, synthetic construct
  source 1..19: note = Seed: GAGAALQIPFAMQMAYRFN
GAGAALQIPFAMVMSYRVN

SEQ ID NO: 102050 - protein, 19 aa, synthetic construct
  source 1..19: note = Seed: GAGAALQIPFAMQMAYRFN
GAGAALQIPFAMNMSYRIN

SEQ ID NO: 102051 - protein, 19 aa, synthetic construct
  source 1..19: note = Seed: GAGAALQIPFAMQMAYRFN
GAGAALQIPFAMSMVYRMN

SEQ ID NO: 102052 - protein, 19 aa, synthetic construct
  source 1..19: note = Seed: GAGAALQIPFAMQMAYRFN
GAGAALQIPFAMLMSYRVN

SEQ ID NO: 102053 - protein, 19 aa, synthetic construct
  source 1..19: note = Seed: GAGAALQIPFAMQMAYRFN
GAGAALQIPFAMLMAYRYN

SEQ ID NO: 102054 - protein, 19 aa, synthetic construct
  source 1..19: note = Seed: GAGAALQIPFAMQMAYRFN
GAGAALQIPFAMSMPYRFN

SEQ ID NO: 102055 - protein, 19 aa, synthetic construct
  source 1..19: note = Seed: SELVIGAVILRGHLRIAGH
SELFIGNVVLRVHLRIAGH

SEQ ID NO: 102056 - protein, 19 aa, synthetic construct
  source 1..19: note = Seed: GAGAALQIPFAMQMAYRFN
GAGAALQIPFAMAMVYRIN

SEQ ID NO: 102057 - protein, 19 aa, synthetic construct
  source 1..19: note = Seed: GAGAALQIPFAMQMAYRFN
GAGAALQIPFAMMMNYRIN

SEQ ID NO: 102058 - protein, 19 aa, synthetic construct
  source 1..19: note = Seed: GAGAALQIPFAMQMAYRFN
GAGAALQIPFAMMMFYRRN

SEQ ID NO: 102059 - protein, 19 aa, synthetic construct
  source 1..19: note = Seed: GAGAALQIPFAMQMAYRFN
GAGAALQIPFAMMMSYRLN

SEQ ID NO: 102060 - protein, 19 aa, synthetic construct
  source 1..19: note = Seed: GAGAALQIPFAMQMAYRFN
GAGAALQIPLAMTMAYRIN

SEQ ID NO: 102061 - protein, 19 aa, synthetic construct
  source 1..19: note = Seed: SELVIGAVILRGHLRIAGH
SELFIGTVALRDHLRIAGH

SEQ ID NO: 102062 - protein, 19 aa, synthetic construct
  source 1..19: note = Seed: GAGAALQIPFAMQMAYRFN
GAGAALQIPFAMDMAYRIN

SEQ ID NO: 102063 - protein, 19 aa, synthetic construct
  source 1..19: note = Seed: GAGAALQIPFAMQMAYRFN
GAGAALQIPWAMDMFYRVN

SEQ ID NO: 102064 - protein, 19 aa, synthetic construct
  source 1..19: note = Seed: GAGAALQIPFAMQMAYRFN
GAGAALQIPFAMNMPYRIN

SEQ ID NO: 102065 - protein, 19 aa, synthetic construct
  source 1..19: note = Seed: GAGAALQIPFAMQMAYRFN
GAGAALQIPFAMFMPYRAN

SEQ ID NO: 102066 - protein, 19 aa, synthetic construct
  source 1..19: note = Seed: GAGAALQIPFAMQMAYRFN
GAGAALQIPFAMTMNYRVN

SEQ ID NO: 102067 - protein, 19 aa, synthetic construct
  source 1..19: note = Seed: SELVIGAVILRGHLRIAGH
SELFIGMVPLRMHLRIAGH

SEQ ID NO: 102068 - protein, 19 aa, synthetic construct
  source 1..19: note = Seed: SELVIGAVILRGHLRIAGH
SELYIGEVVLRVHLRIAGH

SEQ ID NO: 102069 - protein, 19 aa, synthetic construct
  source 1..19: note = Seed: GAGAALQIPFAMQMAYRFN
GAGAALQIPFAMNMAYRMN

SEQ ID NO: 102070 - protein, 19 aa, synthetic construct
  source 1..19: note = Seed: SELVIGAVILRGHLRIAGH
SELYIGTVILRNHLRIAGH

SEQ ID NO: 102071 - protein, 19 aa, synthetic construct
  source 1..19: note = Seed: GAGAALQIPFAMQMAYRFN
GAGAALQIPFAMNMSYRVN

SEQ ID NO: 102072 - protein, 19 aa, synthetic construct
  source 1..19: note = Seed: GAGAALQIPFAMQMAYRFN
GAGAALQIPFAMAMVYRLN

SEQ ID NO: 102073 - protein, 19 aa, synthetic construct
  source 1..19: note = Seed: SFRLFARTRSMWSFNPETN
SFRLFARIRNMWDFNPETN

SEQ ID NO: 102074 - protein, 19 aa, synthetic construct
  source 1..19: note = Seed: GAGAALQIPFAMQMAYRFN
GAGAALQIPFAMQMVYRVN

SEQ ID NO: 102075 - protein, 19 aa, synthetic construct
  source 1..19: note = Seed: GAGAALQIPFAMQMAYRFN
GAGAALQIPFAMDMAYRLN

SEQ ID NO: 102076 - protein, 19 aa, synthetic construct
  source 1..19: note = Seed: GAGAALQIPFAMQMAYRFN
GAGAALQIPFAMFMNYRVN

SEQ ID NO: 102077 - protein, 19 aa, synthetic construct
  source 1..19: note = Seed: GAGAALQIPFAMQMAYRFN
GAGAALQIPFAMNMVYRYN

SEQ ID NO: 102078 - protein, 19 aa, synthetic construct
  source 1..19: note = Seed: GAGAALQIPFAMQMAYRFN
GAGAALQIPFAMLMSYRLN

SEQ ID NO: 102079 - protein, 19 aa, synthetic construct
  source 1..19: note = Seed: SELVIGAVILRGHLRIAGH
SELYIGSVILREHLRIAGH

SEQ ID NO: 102080 - protein, 19 aa, synthetic construct
  source 1..19: note = Seed: GAGAALQIPFAMQMAYRFN
GAGAALQIPFAMMMNYRLN

SEQ ID NO: 102081 - protein, 19 aa, synthetic construct
  source 1..19: note = Seed: GAGAALQIPFAMQMAYRFN
GAGAALQIPFAMIMGYRVN

SEQ ID NO: 102082 - protein, 19 aa, synthetic construct
  source 1..19: note = Seed: GAGAALQIPFAMQMAYRFN
GAGAALQIPFAMAMIYRMN

SEQ ID NO: 102083 - protein, 19 aa, synthetic construct
  source 1..19: note = Seed: GAGAALQIPFAMQMAYRFN
GAGAALQIPFAMMMTYRVN

SEQ ID NO: 102084 - protein, 19 aa, synthetic construct
  source 1..19: note = Seed: GAGAALQIPFAMQMAYRFN
GAGAALQIPLAMNMLYRVN

SEQ ID NO: 102085 - protein, 19 aa, synthetic construct
  source 1..19: note = Seed: GAGAALQIPFAMQMAYRFN
GAGAALQIPFAMQMSYRLN

SEQ ID NO: 102086 - protein, 19 aa, synthetic construct
  source 1..19: note = Seed: GAGAALQIPFAMQMAYRFN
GAGAALQIPFAMTMIYRRN

SEQ ID NO: 102087 - protein, 19 aa, synthetic construct
  source 1..19: note = Seed: SELVIGAVILRGHLRIAGH
SELFIGNVALRLHLRIAGH

SEQ ID NO: 102088 - protein, 19 aa, synthetic construct
  source 1..19: note = Seed: SELVIGAVILRGHLRIAGH
SELIIGMVTLREHLRIAGH

SEQ ID NO: 102089 - protein, 19 aa, synthetic construct
  source 1..19: note = Seed: GAGAALQIPFAMQMAYRFN
GAGAALQIPIAMTMAYRVN

SEQ ID NO: 102090 - protein, 19 aa, synthetic construct
  source 1..19: note = Seed: GAGAALQIPFAMQMAYRFN
GAGAALQIPFAMAMAYRAN

SEQ ID NO: 102091 - protein, 19 aa, synthetic construct
  source 1..19: note = Seed: GAGAALQIPFAMQMAYRFN
GAGAALQIPIAMHMAYRLN

SEQ ID NO: 102092 - protein, 19 aa, synthetic construct
  source 1..19: note = Seed: GAGAALQIPFAMQMAYRFN
GAGAALQIPFAMFMSYRVN

SEQ ID NO: 102093 - protein, 19 aa, synthetic construct
  source 1..19: note = Seed: GAGAALQIPFAMQMAYRFN
GAGAALQIPFAMMMAYRAN

SEQ ID NO: 102094 - protein, 19 aa, synthetic construct
  source 1..19: note = Seed: GAGAALQIPFAMQMAYRFN
GAGAALQIPLAMHMAYRLN

SEQ ID NO: 102095 - protein, 19 aa, synthetic construct
  source 1..19: note = Seed: GAGAALQIPFAMQMAYRFN
GAGAALQIPFAMQMVYRLN

SEQ ID NO: 102096 - protein, 19 aa, synthetic construct
  source 1..19: note = Seed: GAGAALQIPFAMQMAYRFN
GAGAALQIPFAMNMPYRLN

SEQ ID NO: 102097 - protein, 19 aa, synthetic construct
  source 1..19: note = Seed: GAGAALQIPFAMQMAYRFN
GAGAALQIPFAMTMVYRMN

SEQ ID NO: 102098 - protein, 19 aa, synthetic construct
  source 1..19: note = Seed: GAGAALQIPFAMQMAYRFN
GAGAALQIPFAMLMAYRMN

SEQ ID NO: 102099 - protein, 19 aa, synthetic construct
  source 1..19: note = Seed: SELVIGAVILRGHLRIAGH
SELFIGDVVLRIHLRIAGH

SEQ ID NO: 102100 - protein, 19 aa, synthetic construct
  source 1..19: note = Seed: SFRLFARTRSMWSFNPETN
SFRLIARYRNMWVFNPETN

SEQ ID NO: 102101 - protein, 19 aa, synthetic construct
  source 1..19: note = Seed: GAGAALQIPFAMQMAYRFN
GAGAALQIPFAMEMVYRVN

SEQ ID NO: 102102 - protein, 19 aa, synthetic construct
  source 1..19: note = Seed: GAGAALQIPFAMQMAYRFN
GAGAALQIPFAMQMLYRYN

SEQ ID NO: 102103 - protein, 19 aa, synthetic construct
  source 1..19: note = Seed: GAGAALQIPFAMQMAYRFN
GAGAALQIPIAMTMFYRSN

SEQ ID NO: 102104 - protein, 19 aa, synthetic construct
  source 1..19: note = Seed: SELVIGAVILRGHLRIAGH
SELIIGFVPLRVHLRIAGH

SEQ ID NO: 102105 - protein, 19 aa, synthetic construct
  source 1..19: note = Seed: SFRLFARTRSMWSFNPETN
SFRLFARDRAMWAFNPETN

SEQ ID NO: 102106 - protein, 19 aa, synthetic construct
  source 1..19: note = Seed: GAGAALQIPFAMQMAYRFN
GAGAALQIPIAMSMSYRIN

SEQ ID NO: 102107 - protein, 19 aa, synthetic construct
  source 1..19: note = Seed: SELVIGAVILRGHLRIAGH
SELFIGNVALRFHLRIAGH

SEQ ID NO: 102108 - protein, 19 aa, synthetic construct
  source 1..19: note = Seed: GAGAALQIPFAMQMAYRFN
GAGAALQIPFAMIMSYRAN

SEQ ID NO: 102109 - protein, 19 aa, synthetic construct
  source 1..19: note = Seed: GAGAALQIPFAMQMAYRFN
GAGAALQIPIAMLMPYRVN

SEQ ID NO: 102110 - protein, 19 aa, synthetic construct
  source 1..19: note = Seed: SFRLFARTRSMWSFNPETN
SFRLFARMRTMWDFNPETN

SEQ ID NO: 102111 - protein, 19 aa, synthetic construct
  source 1..19: note = Seed: GAGAALQIPFAMQMAYRFN
GAGAALQIPFAMIMAYRDN

SEQ ID NO: 102112 - protein, 19 aa, synthetic construct
  source 1..19: note = Seed: GAGAALQIPFAMQMAYRFN
GAGAALQIPFAMIMLYRRN

SEQ ID NO: 102113 - protein, 19 aa, synthetic construct
  source 1..19: note = Seed: SELVIGAVILRGHLRIAGH
SELMIGFVPLRVHLRIAGH

SEQ ID NO: 102114 - protein, 19 aa, synthetic construct
  source 1..19: note = Seed: GAGAALQIPFAMQMAYRFN
GAGAALQIPIAMNMAYRIN

SEQ ID NO: 102115 - protein, 19 aa, synthetic construct
  source 1..19: note = Seed: GAGAALQIPFAMQMAYRFN
GAGAALQIPFAMIMLYRNN

SEQ ID NO: 102116 - protein, 19 aa, synthetic construct
  source 1..19: note = Seed: GAGAALQIPFAMQMAYRFN
GAGAALQIPFAMMMSYRAN

SEQ ID NO: 102117 - protein, 19 aa, synthetic construct
  source 1..19: note = Seed: SELVIGAVILRGHLRIAGH
SELFIGMVMLRHHLRIAGH

SEQ ID NO: 102118 - protein, 19 aa, synthetic construct
  source 1..19: note = Seed: GAGAALQIPFAMQMAYRFN
GAGAALQIPFAMQMIYRMN

SEQ ID NO: 102119 - protein, 19 aa, synthetic construct
  source 1..19: note = Seed: GAGAALQIPFAMQMAYRFN
GAGAALQIPLAMSMSYRIN

SEQ ID NO: 102120 - protein, 19 aa, synthetic construct
  source 1..19: note = Seed: GAGAALQIPFAMQMAYRFN
GAGAALQIPFAMIMSYRSN

SEQ ID NO: 102121 - protein, 19 aa, synthetic construct
  source 1..19: note = Seed: SELVIGAVILRGHLRIAGH
SELFIGNVVLRMHLRIAGH

SEQ ID NO: 102122 - protein, 19 aa, synthetic construct
  source 1..19: note = Seed: SELVIGAVILRGHLRIAGH
SELYIGGVPLRTHLRIAGH

SEQ ID NO: 102123 - protein, 19 aa, synthetic construct
  source 1..19: note = Seed: GAGAALQIPFAMQMAYRFN
GAGAALQIPFAMNMVYRAN

SEQ ID NO: 102124 - protein, 19 aa, synthetic construct
  source 1..19: note = Seed: GAGAALQIPFAMQMAYRFN
GAGAALQIPIAMSMSYRLN

SEQ ID NO: 102125 - protein, 19 aa, synthetic construct
  source 1..19: note = Seed: GAGAALQIPFAMQMAYRFN
GAGAALQIPFAMMMHYRVN

SEQ ID NO: 102126 - protein, 19 aa, synthetic construct
  source 1..19: note = Seed: SELVIGAVILRGHLRIAGH
SELYIGTVMLREHLRIAGH

SEQ ID NO: 102127 - protein, 19 aa, synthetic construct
  source 1..19: note = Seed: GAGAALQIPFAMQMAYRFN
GAGAALQIPFAMAMSYRAN

SEQ ID NO: 102128 - protein, 19 aa, synthetic construct
  source 1..19: note = Seed: GAGAALQIPFAMQMAYRFN
GAGAALQIPFAMNMTYRIN

SEQ ID NO: 102129 - protein, 19 aa, synthetic construct
  source 1..19: note = Seed: GAGAALQIPFAMQMAYRFN
GAGAALQIPFAMLMSYRAN

SEQ ID NO: 102130 - protein, 19 aa, synthetic construct
  source 1..19: note = Seed: GAGAALQIPFAMQMAYRFN
GAGAALQIPFAMFMSYRAN

SEQ ID NO: 102131 - protein, 19 aa, synthetic construct
  source 1..19: note = Seed: GAGAALQIPFAMQMAYRFN
GAGAALQIPFAMHMNYRIN

SEQ ID NO: 102132 - protein, 19 aa, synthetic construct
  source 1..19: note = Seed: GAGAALQIPFAMQMAYRFN
GAGAALQIPFAMNMAYRAN

SEQ ID NO: 102133 - protein, 19 aa, synthetic construct
  source 1..19: note = Seed: GAGAALQIPFAMQMAYRFN
GAGAALQIPFAMFMNYRAN

SEQ ID NO: 102134 - protein, 19 aa, synthetic construct
  source 1..19: note = Seed: GAGAALQIPFAMQMAYRFN
GAGAALQIPFAMYMSYRVN

SEQ ID NO: 102135 - protein, 19 aa, synthetic construct
  source 1..19: note = Seed: SELVIGAVILRGHLRIAGH
SELFIGIVPLRFHLRIAGH

SEQ ID NO: 102136 - protein, 19 aa, synthetic construct
  source 1..19: note = Seed: SELVIGAVILRGHLRIAGH
SELFIGWVALRMHLRIAGH

SEQ ID NO: 102137 - protein, 19 aa, synthetic construct
  source 1..19: note = Seed: GAGAALQIPFAMQMAYRFN
GAGAALQIPFAMLMIYRDN

SEQ ID NO: 102138 - protein, 19 aa, synthetic construct
  source 1..19: note = Seed: GAGAALQIPFAMQMAYRFN
GAGAALQIPFAMYMNYRLN

SEQ ID NO: 102139 - protein, 19 aa, synthetic construct
  source 1..19: note = Seed: GAGAALQIPFAMQMAYRFN
GAGAALQIPFAMLMSYRRN

SEQ ID NO: 102140 - protein, 19 aa, synthetic construct
  source 1..19: note = Seed: GAGAALQIPFAMQMAYRFN
GAGAALQIPYAMTMVYRVN

SEQ ID NO: 102141 - protein, 19 aa, synthetic construct
  source 1..19: note = Seed: GAGAALQIPFAMQMAYRFN
GAGAALQIPFAMLMAYRDN

SEQ ID NO: 102142 - protein, 19 aa, synthetic construct
  source 1..19: note = Seed: GAGAALQIPFAMQMAYRFN
GAGAALQIPFAMEMIYRNN

SEQ ID NO: 102143 - protein, 19 aa, synthetic construct
  source 1..19: note = Seed: GAGAALQIPFAMQMAYRFN
GAGAALQIPFAMIMVYRDN

SEQ ID NO: 102144 - protein, 19 aa, synthetic construct
  source 1..19: note = Seed: GAGAALQIPFAMQMAYRFN
GAGAALQIPFAMSMSYRAN

SEQ ID NO: 102145 - protein, 19 aa, synthetic construct
  source 1..19: note = Seed: SELVIGAVILRGHLRIAGH
SELFIGMVTLRHHLRIAGH

SEQ ID NO: 102146 - protein, 19 aa, synthetic construct
  source 1..19: note = Seed: GAGAALQIPFAMQMAYRFN
GAGAALQIPYAMFMSYRVN

SEQ ID NO: 102147 - protein, 19 aa, synthetic construct
  source 1..19: note = Seed: GAGAALQIPFAMQMAYRFN
GAGAALQIPFAMVMSYRAN

SEQ ID NO: 102148 - protein, 19 aa, synthetic construct
  source 1..19: note = Seed: GAGAALQIPFAMQMAYRFN
GAGAALQIPFAMMMTYRAN

SEQ ID NO: 102149 - protein, 19 aa, synthetic construct
  source 1..19: note = Seed: GAGAALQIPFAMQMAYRFN
GAGAALQIPFAMLMIYRHN

SEQ ID NO: 102150 - protein, 19 aa, synthetic construct
  source 1..19: note = Seed: SELVIGAVILRGHLRIAGH
SELFIGTVPLREHLRIAGH

SEQ ID NO: 102151 - protein, 19 aa, synthetic construct
  source 1..19: note = Seed: GAGAALQIPFAMQMAYRFN
GAGAALQIPFAMNMSYRFN

SEQ ID NO: 102152 - protein, 19 aa, synthetic construct
  source 1..19: note = Seed: GAGAALQIPFAMQMAYRFN
GAGAALQIPFAMMMIYRVN

SEQ ID NO: 102153 - protein, 19 aa, synthetic construct
  source 1..19: note = Seed: GAGAALQIPFAMQMAYRFN
GAGAALQIPFAMYMSYRIN

SEQ ID NO: 102154 - protein, 19 aa, synthetic construct
  source 1..19: note = Seed: SELVIGAVILRGHLRIAGH
SELLIGMVPLRIHLRIAGH

SEQ ID NO: 102155 - protein, 19 aa, synthetic construct
  source 1..19: note = Seed: GAGAALQIPFAMQMAYRFN
GAGAALQIPFAMIMTYRAN

SEQ ID NO: 102156 - protein, 19 aa, synthetic construct
  source 1..19: note = Seed: GAGAALQIPFAMQMAYRFN
GAGAALQIPFAMLMNYRAN

SEQ ID NO: 102157 - protein, 19 aa, synthetic construct
  source 1..19: note = Seed: GAGAALQIPFAMQMAYRFN
GAGAALQIPFAMYMSYRLN

SEQ ID NO: 102158 - protein, 19 aa, synthetic construct
  source 1..19: note = Seed: GAGAALQIPFAMQMAYRFN
GAGAALQIPIAMMMNYRVN

SEQ ID NO: 102159 - protein, 19 aa, synthetic construct
  source 1..19: note = Seed: GAGAALQIPFAMQMAYRFN
GAGAALQIPFAMAMSYRSN

SEQ ID NO: 102160 - protein, 19 aa, synthetic construct
  source 1..19: note = Seed: GAGAALQIPFAMQMAYRFN
GAGAALQIPFAMLMVYRDN

SEQ ID NO: 102161 - protein, 19 aa, synthetic construct
  source 1..19: note = Seed: GAGAALQIPFAMQMAYRFN
GAGAALQIPFAMMMIYRDN

SEQ ID NO: 102162 - protein, 19 aa, synthetic construct
  source 1..19: note = Seed: GAGAALQIPFAMQMAYRFN
GAGAALQIPLAMMMSYRVN

SEQ ID NO: 102163 - protein, 19 aa, synthetic construct
  source 1..19: note = Seed: GAGAALQIPFAMQMAYRFN
GAGAALQIPIAMSMNYRIN

SEQ ID NO: 102164 - protein, 19 aa, synthetic construct
  source 1..19: note = Seed: SELVIGAVILRGHLRIAGH
SELFIGIVALRMHLRIAGH

SEQ ID NO: 102165 - protein, 19 aa, synthetic construct
  source 1..19: note = Seed: GAGAALQIPFAMQMAYRFN
GAGAALQIPFAMYMTYRVN

SEQ ID NO: 102166 - protein, 19 aa, synthetic construct
  source 1..19: note = Seed: GAGAALQIPFAMQMAYRFN
GAGAALQIPFAMVMVYRDN

SEQ ID NO: 102167 - protein, 19 aa, synthetic construct
  source 1..19: note = Seed: GAGAALQIPFAMQMAYRFN
GAGAALQIPIAMMMRYRHN

SEQ ID NO: 102168 - protein, 19 aa, synthetic construct
  source 1..19: note = Seed: GAGAALQIPFAMQMAYRFN
GAGAALQIPIAMHMSYRLN

SEQ ID NO: 102169 - protein, 19 aa, synthetic construct
  source 1..19: note = Seed: GAGAALQIPFAMQMAYRFN
GAGAALQIPLAMMMAYRYN

SEQ ID NO: 102170 - protein, 19 aa, synthetic construct
  source 1..19: note = Seed: GAGAALQIPFAMQMAYRFN
GAGAALQIPFAMFMDYRVN

SEQ ID NO: 102171 - protein, 19 aa, synthetic construct
  source 1..19: note = Seed: SELVIGAVILRGHLRIAGH
SELYIGNVILRLHLRIAGH

SEQ ID NO: 102172 - protein, 19 aa, synthetic construct
  source 1..19: note = Seed: SELVIGAVILRGHLRIAGH
SELFIGDVLLRNHLRIAGH

SEQ ID NO: 102173 - protein, 19 aa, synthetic construct
  source 1..19: note = Seed: SELVIGAVILRGHLRIAGH
SELFIGFVPLRNHLRIAGH

SEQ ID NO: 102174 - protein, 19 aa, synthetic construct
  source 1..19: note = Seed: GAGAALQIPFAMQMAYRFN
GAGAALQIPFAMAMTYRAN

SEQ ID NO: 102175 - protein, 19 aa, synthetic construct
  source 1..19: note = Seed: GAGAALQIPFAMQMAYRFN
GAGAALQIPIAMAMSYRIN

SEQ ID NO: 102176 - protein, 19 aa, synthetic construct
  source 1..19: note = Seed: SELVIGAVILRGHLRIAGH
SELFIGEVVLRNHLRIAGH

SEQ ID NO: 102177 - protein, 19 aa, synthetic construct
  source 1..19: note = Seed: SFRLFARTRSMWSFNPETN
SFRLFARGRPMWIFNPETN

SEQ ID NO: 102178 - protein, 19 aa, synthetic construct
  source 1..19: note = Seed: SELVIGAVILRGHLRIAGH
SELFIGDVILRFHLRIAGH

SEQ ID NO: 102179 - protein, 19 aa, synthetic construct
  source 1..19: note = Seed: GAGAALQIPFAMQMAYRFN
GAGAALQIPIAMHMSYRIN

SEQ ID NO: 102180 - protein, 19 aa, synthetic construct
  source 1..19: note = Seed: SELVIGAVILRGHLRIAGH
SELYIGLVPLRLHLRIAGH

SEQ ID NO: 102181 - protein, 19 aa, synthetic construct
  source 1..19: note = Seed: SELVIGAVILRGHLRIAGH
SELIIGVVPLRFHLRIAGH

SEQ ID NO: 102182 - protein, 19 aa, synthetic construct
  source 1..19: note = Seed: SELVIGAVILRGHLRIAGH
SELRIGTVVLRMHLRIAGH

SEQ ID NO: 102183 - protein, 19 aa, synthetic construct
  source 1..19: note = Seed: SELVIGAVILRGHLRIAGH
SELFIGLVPLRYHLRIAGH

SEQ ID NO: 102184 - protein, 19 aa, synthetic construct
  source 1..19: note = Seed: GAGAALQIPFAMQMAYRFN
GAGAALQIPFAMFMDYRIN

SEQ ID NO: 102185 - protein, 19 aa, synthetic construct
  source 1..19: note = Seed: SELVIGAVILRGHLRIAGH
SELFIGIVALRYHLRIAGH

SEQ ID NO: 102186 - protein, 19 aa, synthetic construct
  source 1..19: note = Seed: GAGAALQIPFAMQMAYRFN
GAGAALQIPIAMHMSYRVN

SEQ ID NO: 102187 - protein, 19 aa, synthetic construct
  source 1..19: note = Seed: SELVIGAVILRGHLRIAGH
SELLIGIVPLRLHLRIAGH

SEQ ID NO: 102188 - protein, 19 aa, synthetic construct
  source 1..19: note = Seed: SELVIGAVILRGHLRIAGH
SELFIGEVALREHLRIAGH

SEQ ID NO: 102189 - protein, 19 aa, synthetic construct
  source 1..19: note = Seed: GAGAALQIPFAMQMAYRFN
GAGAALQIPFAMTMTYRAN

SEQ ID NO: 102190 - protein, 19 aa, synthetic construct
  source 1..19: note = Seed: GAGAALQIPFAMQMAYRFN
GAGAALQIPFAMFMDYRLN

SEQ ID NO: 102191 - protein, 19 aa, synthetic construct
  source 1..19: note = Seed: GAGAALQIPFAMQMAYRFN
GAGAALQIPIAMMMTYRVN

SEQ ID NO: 102192 - protein, 19 aa, synthetic construct
  source 1..19: note = Seed: GAGAALQIPFAMQMAYRFN
GAGAALQIPIAMMMAYRAN

SEQ ID NO: 102193 - protein, 19 aa, synthetic construct
  source 1..19: note = Seed: SELVIGAVILRGHLRIAGH
SELYIGDVFLRDHLRIAGH

SEQ ID NO: 102194 - protein, 19 aa, synthetic construct
  source 1..19: note = Seed: GAGAALQIPFAMQMAYRFN
GAGAALQIPIAMMMNYRAN

SEQ ID NO: 102195 - protein, 19 aa, synthetic construct
  source 1..19: note = Seed: SFRLFARTRSMWSFNPETN
SFRLFARDRNMWAFNPETN

SEQ ID NO: 102196 - protein, 19 aa, synthetic construct
  source 1..19: note = Seed: SELVIGAVILRGHLRIAGH
SELYIGEVLLREHLRIAGH

SEQ ID NO: 102197 - protein, 19 aa, synthetic construct
  source 1..19: note = Seed: SELVIGAVILRGHLRIAGH
SELFIGEVVLRDHLRIAGH

SEQ ID NO: 102198 - protein, 19 aa, synthetic construct
  source 1..19: note = Seed: GAGAALQIPFAMQMAYRFN
GAGAALQIPIAMIMNYRAN

SEQ ID NO: 102199 - protein, 19 aa, synthetic construct
  source 1..19: note = Seed: GAGAALQIPFAMQMAYRFN
GAGAALQIPIAMFMDYRVN

SEQ ID NO: 102200 - protein, 19 aa, synthetic construct
  source 1..19: note = Seed: GAGAALQIPFAMQMAYRFN
GAGAALQIPIAMIMSYRAN

SEQ ID NO: 102201 - protein, 19 aa, synthetic construct
  source 1..19: note = Seed: GAGAALQIPFAMQMAYRFN
GAGAALQIPFAMIMNYREN

SEQ ID NO: 102202 - protein, 19 aa, synthetic construct
  source 1..19: note = Seed: GAGAALQIPFAMQMAYRFN
GAGAALQIPYAMTMSYRMN

SEQ ID NO: 102203 - protein, 19 aa, synthetic construct
  source 1..19: note = Seed: SELVIGAVILRGHLRIAGH
SELYIGFVALRMHLRIAGH

SEQ ID NO: 102204 - protein, 19 aa, synthetic construct
  source 1..19: note = Seed: SELVIGAVILRGHLRIAGH
SELVIGFVPLRLHLRIAGH

SEQ ID NO: 102205 - protein, 19 aa, synthetic construct
  source 1..19: note = Seed: SELVIGAVILRGHLRIAGH
SELYIGEVILREHLRIAGH

SEQ ID NO: 102206 - protein, 19 aa, synthetic construct
  source 1..19: note = Seed: GAGAALQIPFAMQMAYRFN
GAGAALQIPIAMAMGYRVN

SEQ ID NO: 102207 - protein, 19 aa, synthetic construct
  source 1..19: note = Seed: GAGAALQIPFAMQMAYRFN
GAGAALQIPIAMQMSYRAN

SEQ ID NO: 102208 - protein, 19 aa, synthetic construct
  source 1..19: note = Seed: GAGAALQIPFAMQMAYRFN
GAGAALQIPFAMMMTYRGN

SEQ ID NO: 102209 - protein, 19 aa, synthetic construct
  source 1..19: note = Seed: SELVIGAVILRGHLRIAGH
SELFIGDVILREHLRIAGH

SEQ ID NO: 102210 - protein, 19 aa, synthetic construct
  source 1..19: note = Seed: GAGAALQIPFAMQMAYRFN
GAGAALQIPFAMGMAYRFN

SEQ ID NO: 102211 - protein, 19 aa, synthetic construct
  source 1..19: note = Seed: SELVIGAVILRGHLRIAGH
SELFIGFVPLRFHLRIAGH

SEQ ID NO: 102212 - protein, 19 aa, synthetic construct
  source 1..19: note = Seed: SELVIGAVILRGHLRIAGH
SELFIGFVALRYHLRIAGH

SEQ ID NO: 102213 - protein, 19 aa, synthetic construct
  source 1..19: note = Seed: SELVIGAVILRGHLRIAGH
SELLIGMVNLRDHLRIAGH

SEQ ID NO: 102214 - protein, 19 aa, synthetic construct
  source 1..19: note = Seed: SELVIGAVILRGHLRIAGH
SELIIGMVNLRDHLRIAGH

SEQ ID NO: 102215 - protein, 1053 aa, synthetic construct
MRVTAPRTLILLLSGALALTETWAGSGGSGGGGSGGFLLNKEMYLGGSGGGGSGGFVFKNIDGYGGSGGGGSGGIPFAMQMAYGGSGGGGSGGISDYDYYRYGGSGGGGSGGKLFAAETLKGGSGGGGSGGKQFDTYNLWGGSGGGGSGGLMIERFVSLGGSGGGGSGGLSPRWYFYYGGSGGGGSGGSELVIGAVIGGSGGGGSGGSETKCTLKSFGGSGGGGSGGYVFCTVNALGGSGGGGSGGKMFAAETLKGGSGGGGSGGKMFDTYNLFGGSGGGGSGGKVFAAETLKGGSGGGGSGGKYFDTYNLWGGSGGGGSGGLRIERFVSLGGSGGGGSGGTTLPVNVAWGGSGGGGSGGVSDKYFDCYGGSGGGGSGGWVFGTTLDSKGGSGGGGSGGYAFCTVNALGGSGGGGSGGGAGAALQIPFAMQMAYRFNGGSGGGGSGGMAYRFNGIGVTQNVLYENQGGSGGGGSGGRLITGRLQSLQTYVTQQLIGGSGGGGSGGSFRLFARTRSMWSFNPETNGGSGGGGSGGVKDCVVLHSYFTSDYYQLYGGSGGGGSGGGAGAAFQIHFFMQTAYRFNGGSGGGGSGGGAGAALQIPFAMHMFYRVNGGSGGGGSGGGAGAALQIPFAMHMSYRVNGGSGGGGSGGGAGAALQIPFAMMMNYRANGGSGGGGSGGGAGAALQIPFAMSMAYRINGGSGGGGSGGGAGAALQIPFAMSMFYRVNGGSGGGGSGGGAGAALQIPFAMSMNYRINGGSGGGGSGGGAGAALQIPIAMAMAYRVNGGSGGGGSGGGAGAALQIPIAMYMNYRINGGSGGGGSGGSELIIGAVPLRAHLRIAGHGGSGGGGSGGSELMIGAVPLRAHLRIAGHGGSGGGGSGGSELVIGAIILNGALRVAGHGGSGGGGSGGVEAEFQISRFITTRLQSLQGGSGGGGSGGVEAELQIDRIITKRLQSLQGGSGGGGSGGVKDCVVLHSFFTTDYYQLYGGSLGGGGSGIVGIVAGLAVLAVVVIGAVVATVMCRRKSSGGKGGSYSQAASSDSAQGSDVSLTA
